(19) United States
(12) Patent Application Publication
(10) Pub. No.: US 2025/0205293 A1
(43) Pub. Date: Jun. 26, 2025

(54) TARGETING E COLI CELLS

(71) Applicant: SNIPR Biome ApS, Copenhagen (DK)

(72) Inventors: Jakob KRAUSE HAABER, Copenhagen (DK); Szabolcs SEMSEY, Copenhagen (DK); Mette GROVE, Copenhagen (DK); Birgitte DAMHOLT, Copenhagen (DK); Dziuginta JASINSKYTE, Copenhagen (DK); Yilmaz Emre GENÇAY, Copenhagen (DK)

(21) Appl. No.: 18/990,606

(22) Filed: Dec. 20, 2024

Related U.S. Application Data
(63) Continuation of application No. PCT/EP2023/067906, filed on Jun. 29, 2023.

(30) Foreign Application Priority Data
Jun. 29, 2022 (GB) 2209518.6
Mar. 6, 2023 (GB) 2303242.8

(51) Int. Cl. A61K 35/76; A61P 31/04; C12N 7/00; C12N 9/22; C12N 15/11; C12N 15/90

(52) U.S. Cl. CPC A61K 35/76; A61P 31/04; C12N 7/00; C12N 9/22; C12N 15/11; C12N 15/90; C12N 2310/20; C12N 2795/10032; C12N 2795/10043; C12N 2795/10045; C12N 2795/10071

(57) ABSTRACT

The technology described herein relates to methods and compositions for targeting E coli cells, such as for treating or preventing an infection by E coli cells in human or animal subjects. The method, in an embodiment, comprises administering to the subject a particle cocktail comprising a plurality of different transduction particles to E coli cells. The method, in an embodiment, comprises administering to the subject a plurality of transduction particles that encode a nuclease for targeting the genomes of B2 phylogroup E coli cells.

### CROSS REFERENCE TO RELATED APPLICATIONS

[0001] This application is a continuation of PCT Application No. PCT/EP2023/067906, filed on Jun. 29, 2023 which claims priority to and benefit of GB Patent Application No. 2209518.6, filed on Jun. 29, 2022, and GB Patent Application No. 2303242.8, filed on Mar. 6, 2023, the contents of each of which are herein incorporated by reference in their entirety.

### REFERENCE TO AN ELECTRONIC SEQUENCE LISTING

[0002] The content of the electronic sequence listing (786212001801 seqlist.xml; Size: 521,928 bytes; and Date of Creation: Dec. 12, 2024) is herein incorporated by reference in its entirety.

### TECHNICAL FIELD

[0003] The technology described herein relates to methods and compositions for targeting E coli cells, such as for treating or preventing an infection by E coli cells in human or animal subjects. The method, in an embodiment, comprises administering to the subject a particle cocktail comprising a plurality of different transduction particles to E coli cells. The method, in an embodiment, comprises administering to the subject a plurality of transduction particles that encode a nuclease for targeting the genomes of B2 phylogroup E coli cells.

### BACKGROUND

[0004] E coli infection has been identified as harmful or life-threatening in various settings, such as UTI infections, transplant patients, cancer patients and other patients that are immunocompromised or on immunosuppressant.

[0005] Nuclease targeting of E coli, such as by means of CRISPR/Cas systems, has been proposed with delivery using transduction particles that can target the nuclease to E coli cells for chromosomal or episomal cutting, thereby killing cells or reducing their growth or proliferation. Suitable transduction particles are phage or engineered particles (such as non-self-replicative transduction particles) comprising capsids that contain nucleic acid encoding at least crRNAs or gRNAs (or additionally a Cas nuclease) for targeting. Advantageously, selective targeting can be achieved which is not possible using conventional antibiotics, such as broad-spectrum antibiotics. Such selective targeting can avoid killing of beneficial species and strains in treated patients. Indeed, disturbances of the microbiome with broad-spectrum antibiotics is a risk-factor in the prophylactic management of cancer patients at risk of febrile neutropenia.

[0006] Bacteriophage (phage) therapy has been used prior to the broad availability of antibiotics, but has now re-gained interest due to the rise in bacterial antimicrobial resistance (AMR) combined with several successful individual case reports.

[0007] Bacteriophages (phages) are a phylum of viruses that infect bacteria, and are distinct from the animal and plant viruses. Phages can have either a “lytic” life cycle, a “lysogenic” life cycle that can potentially become lytic, or a “non-lytic” life cycle. Phages replicating through the lytic cycle cause lysis of the host bacterial cell as a normal part of their life cycles. Phages replicating through the lysogenic cycles are called temperate phages, and can either replicate by means of the lytic life cycle and cause lysis of the host bacterium, or they can incorporate their DNA into the host bacterial DNA and become noninfectious prophages.

[0008] The natural capability of phages to infect and kill bacteria, together with the specificity of the phage-bacterial interactions, is the basic phenomena on which the concept of phage therapy is built. Therefore, phages that possess lytic life cycle are suitable candidates for phage therapy.

[0009] International Patent Application No. WO 00/69269 discloses the use of certain phage strain for treating infections caused by Vancomycin-sensitive as well as resistant strains of Enterococcus faecium, and International Patent Application No. WO 01/93904 discloses the use of bacteriophage, alone or in combination with other anti-microbial means, for preventing or treating gastrointestinal diseases associated with the species of the genus Clostridium.

[0010] US Patent Application No. 2002/0001590 discloses the use of phage therapy against multi-drug resistant bacteria, specifically methicillin-resistant Staphylococcus aureus, and International Patent Application No. WO 02/07742 discloses the development of bacteriophage having multiple host range.

[0011] The use of phage therapy for the treatment of specific bacterial-infectious disease is disclosed, for example, in US Patent Application Nos. 2002/0044922; 2002/0058027 and International Patent Application No. WO 01/93904.

[0012] US20160333348 describes the use of CRISPR/Cas systems delivered to host bacterial cells using phage as vectors.

[0013] Amongst the several phylogroups of E coli, it has been observed that antibiotic-resistant (eg, fluoroquinolone (FQ)-resistant) and multi-drug resistant (MDR) strains are frequently found in the B2 phylogroup. B2 strains ST131 and ST1193 have been found that are associated with antibiotic resistance. ST131 is a globally dominant multidrug resistant clone associated with high rates in rUTI. ST131 is a major contributor to hospital- and community-acquired UTI, as well as E coli bloodstream infections and infections in companion animals and poultry. Originally identified in 2008, ST131 is associated with the worldwide spread of the CTX-M-15 extended spectrum β-lactamase (ESBL) resistance gene. ST131 is now strongly associated with multidrug resistance (MDR), including resistance to fluoroquinolones. Recent reports have also identified strains that are resistant to last-line carbapenems. Sequence type 1193 has recently emerged as a new, virulent and resistant lineage among fluoroquinolone resistant E coli.

[0014] Classic antibiotics, such as FQ and broad-spectrum antibiotics are not, thus, sufficiently effective for combatting such infections. There is, therefore, a need to find alternative means to address these infections.

### SUMMARY OF THE INVENTION

[0015] The invention provides means for treating or preventing B2 phylogroup E coli infections in humans and animals by combining the use of selective killing with nucleases targeted using specific types of transduction particles. The particles of the invention target by adhesion to LPS, LamB or Tsx, which has surprisingly been found highly advantageous for killing and inhibiting growth of B2 E coli cells of many different strains (including the potentially lethal ST131 and ST1193 strains). As exemplified herein, surprisingly more than 10 different ST131 strains were killed (plaques formed) and more than 10 different ST1193 strains were killed (plaques formed).

[0016] The invention finds utility, for example, to treat or prevent potentially life-threating B2 phylogroup E coli infections in patients, such as in immunosuppressed, cancer, transplant and UTI patients, who are susceptible to infection by B2 strains (and often by multiple different B2 strains). As demonstrated in the Examples, the invention is useful for preventing E coli B2 phylogroup bacteraemia (infection of the blood stream by E coli) in a subject.

[0017] To this end, the invention provides:—

### In a First Configuration

### In a First Aspect:—

[0018] A composition comprising a plurality of transduction particles for use in a method of treating or preventing an infection by E coli cells in a human or animal subject, wherein the method comprises administering the particles to the subject, wherein
[0019] (a) each particle comprises a nucleic acid encoding a nuclease for targeting the genomes of E coli cells, wherein the said administered particles contact the cells and introduce therein the nucleic acid, wherein the nuclease is expressed in the cells and cuts genomic DNA of the cells, thereby killing the cells or reducing growth or proliferation of the cells in the subject;
[0020] (b) the E coli cells are cells of E coli phylogroup B2; and
[0021] (c) each particle comprises an adhesion moiety for recognising and binding to a cognate moiety selected from a LPS, LamB and Tsx displayed on the surface of the phylogroup B2 E coli cells.

### In a Second Aspect:—

[0022] A composition comprising a plurality of transduction particles for use in a method of treating or preventing E coli bacteriaemia in a human or animal subject, wherein the method comprises administering the particles to the subject, wherein
[0023] (a) each particle comprises a nucleic acid encoding a nuclease for targeting the genomes of cells of said E coli, wherein the said administered particles contact the cells and introduce therein the nucleic acid, wherein the nuclease is expressed in the cells and cuts genomic DNA of the cells, thereby killing the cells or reducing growth or proliferation of the cells in the subject;
[0024] (b) the E coli cells are cells of E coli phylogroup B2; and
[0025] (c) each particle comprises an adhesion moiety for recognising and binding to a cognate moiety selected from a LPS, LamB and Tsx displayed on the surface of the phylogroup B2 E coli cells.

### In a Second Configuration

### In a First Aspect:—

[0026] A method for treating or preventing an infection by E coli cells in a human or animal subject, the method comprising administering to the subject a plurality of transduction particles, wherein
[0027] (a) each particle comprises a nucleic acid encoding a nuclease for targeting the genomes of E coli cells, wherein the said administered particles contact the cells and introduce therein the nucleic acid, wherein the nuclease is expressed in the cells and cuts genomic DNA of the cells, thereby killing the cells or reducing growth or proliferation of the cells in the subject;
[0028] (b) the E coli cells are cells of E coli phylogroup B2; and
[0029] (c) each particle comprises an adhesion moiety for recognising and binding to a cognate moiety selected from a LPS, LamB and Tsx displayed on the surface of the phylogroup B2 E coli cells.

### In a Second Aspect:—

[0030] A method for treating or preventing an infection by E coli cells in a human or animal subject, the method comprising administering to the subject a plurality of transduction particles, wherein
[0031] (a) each particle comprises a nucleic acid encoding a crRNA or guide RNA that is operable with a Cas nuclease for chromosomal targeting in the cells, wherein the said administered particles contact the cells and introduce therein the nucleic acid, wherein the crRNA or guide RNA is expressed and guides the Cas nuclease wherein the nuclease cuts the chromosomes of the cells, thereby killing the cells or reducing growth or proliferation of the cells in the subject;
[0032] (b) the E coli cells are cells of E coli phylogroup B2; and
[0033] (c) each particle comprises an adhesion moiety for recognising and binding to a cognate moiety selected from a LPS, LamB and Tsx displayed on the surface of the phylogroup B2 E coli cells.

### In a Third Aspect:—

[0034] A method for treating or preventing E coli bacteriaemia in a human or animal subject, the method comprising administering to the subject a plurality of transduction particles, wherein
[0035] (a) each particle comprises a nucleic acid encoding a nuclease for targeting the genomes of cells of said E coli, wherein the said administered particles contact the cells and introduce therein the nucleic acid, wherein the nuclease is expressed in the cells and cuts genomic DNA of the cells, thereby killing the cells or reducing growth or proliferation of the cells in the subject;
[0036] (b) the E coli cells are cells of E coli phylogroup B2; and
[0037] (c) each particle comprises an adhesion moiety for recognising and binding to a cognate moiety selected from a LPS, LamB and Tsx displayed on the surface of the phylogroup B2 E coli cells.

### In a Fourth Aspect:—

[0038] A method for treating or preventing E coli bacteriaemia in a human or animal subject, the method comprising administering to the subject a plurality of transduction particles, wherein
[0039] (a) each particle comprises a nucleic acid encoding a crRNA or guide RNA that is operable with a Cas nuclease for chromosomal targeting in cells of said E coli, wherein the said administered particles contact the cells and introduce therein the nucleic acid, wherein the crRNA or guide RNA is expressed and guides the Cas nuclease wherein the nuclease cuts the chromosomes of the cells, thereby killing the cells or reducing growth or proliferation of the cells in the subject;
[0040] (b) the E coli cells are cells of E coli phylogroup B2; and
[0041] (c) each particle comprises an adhesion moiety for recognising and binding to a cognate moiety selected from a LPS, LamB and Tsx displayed on the surface of the phylogroup B2 E coli cells.

### In a Third Configuration

### In a First Aspect:—

[0042] Use of a composition comprising a plurality of transduction particles in a method for treating or preventing an infection by phylogroup B2 E coli cells in a human or animal subject, the method comprising administering to the subject the composition, wherein
[0043] (a) each particle comprises a nucleic acid encoding a nuclease for targeting the genomes of E coli cells, wherein the said administered particles contact the cells and introduce therein the nucleic acid, wherein the nuclease is expressed in the cells and cuts genomic DNA of the cells, thereby killing the cells or reducing growth or proliferation of the cells in the subject; and
[0044] (b) each particle comprises an adhesion moiety for recognising and binding to a cognate moiety selected from a LPS, LamB and Tsx displayed on the surface of the phylogroup B2 E coli cells.

### In a Second Aspect:—

[0045] Use of a composition comprising a plurality of transduction particles in a method for treating or preventing an infection by phylogroup B2 E coli cells in a human or animal subject, the method comprising administering to the subject the composition, wherein
[0046] (a) each particle comprises a nucleic acid encoding a crRNA or guide RNA that is operable with a Cas nuclease for chromosomal targeting in the cells, wherein the said administered particles contact the cells and introduce therein the nucleic acid, wherein the crRNA or guide RNA is expressed and guides the Cas nuclease wherein the nuclease cuts the chromosomes of the cells, thereby killing the cells or reducing growth or proliferation of the cells in the subject;
[0047] (b) the E coli cells are cells of E coli phylogroup B2; and
[0048] (c) each particle comprises an adhesion moiety for recognising and binding to a cognate moiety selected from a LPS, LamB and Tsx displayed on the surface of the phylogroup B2 E coli cells.

### In a Third Aspect:—

[0049] Use of a composition comprising a plurality of transduction particles in a method for treating or preventing phylogroup B2 E coli bacteraemia in a human or animal subject, the method comprising administering to the subject the composition, wherein
[0050] (a) each particle comprises a nucleic acid encoding a nuclease for targeting the genomes of cells of said E coli, wherein the said administered particles contact the cells and introduce therein the nucleic acid, wherein the nuclease is expressed in the cells and cuts genomic DNA of the cells, thereby killing the cells or reducing growth or proliferation of the cells in the subject; and
[0051] (b) each particle comprises an adhesion moiety for recognising and binding to a cognate moiety selected from a LPS, LamB and Tsx displayed on the surface of the phylogroup B2 E coli cells.

### In a Fourth Aspect:—

[0052] Use of a composition comprising a plurality of transduction particles in a method for treating or preventing phylogroup B2 E coli bacteraemia in a human or animal subject, the method comprising administering to the subject the composition, wherein
[0053] (a) each particle comprises a nucleic acid encoding a crRNA or guide RNA that is operable with a Cas nuclease for chromosomal targeting in cells of said E coli, wherein the said administered particles contact the cells and introduce therein the nucleic acid, wherein the crRNA or guide RNA is expressed and guides the Cas nuclease wherein the nuclease cuts the chromosomes of the cells, thereby killing the cells or reducing growth or proliferation of the cells in the subject;
[0054] (b) the E coli cells are cells of E coli phylogroup B2; and
[0055] (c) each particle comprises an adhesion moiety for recognising and binding to a cognate moiety selected from a LPS, LamB and Tsx displayed on the surface of the phylogroup B2 E coli cells.

### In a Fourth Configuration

### In a First Aspect:—

[0056] A composition comprising a plurality of transduction particles for use in a method of treating or preventing an infection by E coli cells (optionally B2 phylogroup E coli cells) in a human or animal subject, wherein the method comprises administering the particles to the subject, wherein (a) each particle comprises a nucleic acid encoding a nuclease for targeting the genomes of E coli cells, wherein the said administered particles contact the cells and introduce therein the nucleic acid, wherein the nuclease is expressed in the cells and cuts genomic DNA of the cells, thereby killing the cells or reducing growth or proliferation of the cells in the subject; and
[0057] (b) each particle comprised by the composition is a T-even phage capsid; optionally a capsid of a T2 phage, T2-like phage, RB69 phage or a RB69-like phage.

[0058] A composition comprising a plurality of different types of transduction particles, wherein each of said particles comprises a nucleic acid and said particles are capable of contacting E coli cells and introducing therein the nucleic acid, wherein
[0059] (a) said nucleic acid of each particle comprises a nucleotide sequence encoding a product of interest (POI), wherein the nucleic acid is capable of expressing the POI in an E coli cell;
[0060] (b) each particle comprises an adhesion moiety for recognising and binding to a cognate moiety selected from a LPS, LamB and Tsx (optionally selected from LPS and Tsx) displayed on the surface of E coli cells; and
[0061] (c) said plurality of different types of transduction particles comprises (i) a first type of particles that comprise a LPS adhesion moiety; and (ii) a second type of particles that comprise a Tsx adhesion moiety.

### In a Second Aspect:—

[0062] A method of treating or preventing sepsis, septicaemia or diarrhoea in a human or animal subject, the method comprising administering to the subject the composition of the invention, wherein the E coli cells comprise a strain of E coli that causes sepsis, septicaemia or diarrhoea in humans or animals.

### In a Third Aspect:—

[0063] A method of treating or preventing infection of by E coli cells in a human or animal subject, wherein the method comprises administering the composition of the invention to the subject, wherein the infection is treated or prevented.

### In a Fourth Aspect:—

[0064] A method of detecting the presence of E coli (optionally B2 phylogroup E coli cells) in a sample, the method comprising
[0065] (a) contacting the sample with a composition according to this Configuration; and
[0066] (b) detecting that E coli cells have been killed or the growth or proliferation thereof has been reduced.

### In a Fifth Aspect:—

[0067] A method of detecting the presence of E coli (optionally B2 phylogroup E coli cells) in a sample, the method comprising
[0068] (a) contacting the sample with a composition according to this Configuration; wherein particles of the composition comprise a nucleic acid comprising or encoding a detectable label, wherein the said particles contact the cells and introduce therein the nucleic acid, wherein optionally the label is expressed in the cells; and
[0069] (b) detecting that E coli cells comprising the label.

### In a Sixth Aspect:—

[0070] A method for modifying the genomes of E coli cells, the method comprising contacting the cells with a composition of this Configuration, wherein nucleic acid encoding the POI is introduced into the cells thereby modifying the genomes of the cells.

### BRIEF DESCRIPTION OF THE DRAWINGS

[0071] FIG. 1: Killing and growth inhibition activity of a composition of the invention when tested against E coli of several different phylogroups and different strains within each group (E coli taken from clinical samples); the composition was surprisingly highly effective at killing across many phylogroups (and particularly in the B2 phylogroup, where multiple strains—including those known to be potentially life-threatening and related with antibiotic resistance—were killed or whose growth was effectively inhibited). The 6 negatives comprised non E coli and non FQ resistant samples.

[0072] FIG. 2: Phylo-grouping of strains used in the study and showing particularly advantageous and extensive targeting of many clinical B2 phylogroup strains.

[0073] FIG. 3A: CRISPR-Cas driven elimination of an abbreviated panel of 82 E. coli clinical isolates by conjugation of CGV-EcCAS and empty vector. The conjugation efficiency was determined by spotting a dilution series of the conjugation reaction on LB agar supplemented with antibiotics and calculated as CFU/ml. The limit of detection (LOD) of this assay was 200 CFU/mL. The experiment was carried out in triplicates and is indicated by dots. CGV-EcCAS conjugation experiments indicated by arrow; empty vector conjugations indicated above the dotted line labelled LOD. FIG. 3B): Fraction of CRISPR-armed Phage™ (CAP) and WT phage during co-culture with a host strain susceptible to both phages. CAP α15.2 increases its relative abundance compared to the WT phage from 7% to 86% over two consecutive passages. FIG. 3C: CAP α20.4 outcompeted WT α20 by increasing its relative abundance during co-culture with the common target E. coli strain b230 from 10% to 68% over four consecutive passages. FIG. 3B-FIG. 3C: The ratio of CAP and WT phage during co-culture with a host strain (E. coli b230) susceptible to α15.2, α15, α20.4 and α20. CAP α15.2 increase its relative abundance compared to the WT phage from 7% to 86% (G) while CAP α 20.4 outcompeted WT α20 from 10% to 68% (H).

[0074] FIG. 4: Specificity evaluation of SNIPR001 and individual CAPs against a panel of clinically relevant bacteria and E. coli strain b2480 (positive control) showing no off-target effects. Positive values represent bacterial growth (absence of observed killing), while negative values indicate bacterial killing following phage treatment within the assessed time-period. All values indicated as means of four biological replicates with standard deviations, measuring growth over a 4-hour period, measured in CFU/mL.

[0075] FIG. 5A: An unrooted phylogenetic tree of the JMI strains displaying a clinical panel of 382 E. coli strains encompassing nine phylogroups and 118 MLSTs. Plaquing data reflects a single plaquing replicate. One strain, E. coli b4038, with a long branch has been truncated to 37% of the original length. Phylogenetic distance scale indicated below the phylogenetic tree, as computed by MASH. FIG. 5B: A spot assay was used to analyze the efficacy of SNIPR001 against the clinical panel of 382 E. coli strains (from JMI, North Liberty, IA, USA) isolated from bloodstream infections and the internal 429 E. coli strain panel. The spot assay was conducted as two independent experiments, with results presented as mean±SD values. The standard deviation shown is based on the discrepancy of results between the two runs, calculated as the average absolute deviation of the mean prevalence of a given spotting type, normalized to the panel size. FIG. 5C: Coverage of SNIPR001 does not depend on antibiotic resistant phenotypes; consequently, SNIPR001 targets >90% of E. coli strains that are carbapenem-resistant, extended-spectrum β-lactamase (ESBL)-producing or multi-drug resistant (MDR), and 89% of fluroquinolone resistant E. coli strains. Numbers indicated in each green or grey bar indicates number of bacteria susceptible or resistant to SNIPR001, respectively, for each resistance category. FIG. 5D: A midpoint rooted phylogenetic tree of the 72 fluroquinolone resistant E. coli strains isolated from fecal samples of hematological cancer patients. 67 of the 72 strains are susceptible to at least one of the four CAPS in SNIPR001. FIG. 5E: Redundancy distribution showing 82% of the fluroquinolone resistant E. coli strains (n=72) from panel D are targeted by at least 2 different CAPs.

[0076] FIG. 6A: CAP recovery in minipigs feces after a single p.o. dose of 2×10¹² PFU of SNIPR001 (n=8, shown in green) or vehicle (n=6, shown in grey) over one week with daily sampling. Trend lines indicate average recovered phage in PFU/g feces, dots indicate individual measurement points. LOD of 33 PFU/g feces indicated by the dotted line. FIG. 6B: CAP recovery in minipig feces after a single p.o. dose of 2×10¹² PFU of a single CAP (n=8 minipigs received either α15.2, α20.4 or α51.5, n=7 minipigs received α48.4) over one week with daily sampling. Trend lines indicate average recovery, while points indicate individual measurements. Recovery was measured in PFU/g feces. LOD of 33 PFU/g feces is indicated by the dotted line. FIG. 6C: CAP recovery in mouse feces 8 h, 24 h, and 48 h after the start of treatment with three times daily administration of varying doses of SNIPR001 (n=10 for low, medium, and high, indicated in green), vehicle (n=10, indicated in grey), or gentamicin (n=4, indicated in grey). Recovery is measured in PFU/g feces, LOD of 371 PFU/g feces is indicated by the dotted line. FIG. 6D: E. coli b17 recovery in mouse feces indicates increased SNIPR001 effect with increased dose. Statistical analyses were performed using two-sided Kruskal-Wallis tests for comparison of the SNIPR001-treated groups, two-sided Mann-Whitney U test for comparison of treated groups with vehicle. P<0.05=*, 0.01=**, 0.001=***, FDR corrected using Holm's method separately for each day. Recovery is measured in CFU/g feces, with a limit of detection of 371 CFU/g feces. Animals that have begun SNIPR001 treatment are indicated in green, others in grey. FIG. 6E: E. coli b17 recovery in mouse feces 8 h and 24 h after the start of treatment with three times daily administration of CAPs α15.2, α20.4, α48.4 or α51.5 and in combination as SNIPR001 confirming synergy of the CAPs.

### DETAILED DESCRIPTION

[0077] The invention finds application to combat harmful or life-threatening B2 E coli infections in various settings, such as UTI infections, transplant patients, cancer patients and other patients that are immunocompromised or on immunosuppressant.

[0078] Cancer treatment continues to advance and survival rates for people with hematological malignancies are increasing. However, this population is immunocompromised and chemotherapy regimens cause bone-marrow suppression and gastrointestinal mucositis with associated increased intestinal permeability. Translocation of gut bacteria, including E coli, from the gastrointestinal tract is a frequent cause of bloodstream infections (BSIs). The mortality-related to BSIs can be up to 50%; thus, antimicrobial prophylaxis is applied in people at risk of febrile neutropenia. There are no approved therapies for the prevention of BSIs in patients with hematological cancers, yet fluoroquinolones are used off-label in the United States. This antibiotic prophylaxis practice is at odds with the emerging paradigm that maintaining a normal microbiome is important for upholding immunological tonus potentially benefiting the outcome of oncology treatments. Indeed, disturbances of the microbiome with broad-spectrum antibiotics is a risk-factor in the prophylactic management of patients at risk of febrile neutropenia. Beyond the side effects of fluoroquinolones, including safety warnings and precautions, bacterial resistance is rising and approaching 60% in USA.

[0079] In immunocompromised patients with hematological malignancies at risk of developing neutropenia, E coli is responsible for 25.1-30% of all bacteraemia cases with a 35.8% 90-day mortality rate. Moreover, up to 65% of E coli isolated as the causative pathogen from BSIs in patients with hematological cancers undergoing hematopoietic stem cell transplantation (HSCT) were resistant to fluoroquinolones. Accordingly, novel narrow-spectrum treatment and prophylactic options are needed to prevent infections in these vulnerable patients. The invention addresses this need.

[0080] To this end, the invention provides compositions, methods and uses according to the above Configurations. There is, thus, provided the following description with numbered Embodiments.
[0081] 1. A composition comprising a plurality of transduction particles for use in a method of treating or preventing an infection by E coli cells in a human or animal subject, wherein the method comprises administering the particles to the subject, wherein
   [0082] (a) each particle comprises a nucleic acid encoding a nuclease for targeting the genomes of E coli cells, wherein the said administered particles contact the cells and introduce therein the nucleic acid, wherein the nuclease is expressed in the cells and cuts genomic DNA of the cells, thereby killing the cells or reducing growth or proliferation of the cells in the subject;
   [0083] (b) the E coli cells are cells of E coli phylogroup B2; and
   [0084] (c) each particle comprises an adhesion moiety for recognising and binding to a cognate moiety selected from a LPS, LamB and Tsx displayed on the surface of phylogroup B2 E coli cells.
   [0085] Optionally,
   [0086] (i) each particle comprises a phage capsid containing the nucleic acid;
   [0087] (ii) the particles of the composition target a plurality of different E coli genes, optionally selected from essential and virulence genes; and
   [0088] (iii) the composition comprises
   [0089] A: particles which comprise a LPS adhesion moiety and a LamB adhesion moiety;
   [0090] B: particles which comprise a LPS adhesion moiety and a Tsx adhesion moiety; or
   [0091] C: particles which comprise a Tsx adhesion moiety but is devoid of LamB and LPS adhesion moieties.
[0092] 2. A method for treating or preventing an infection by E coli cells in a human or animal subject, the method comprising administering to the subject a plurality of transduction particles, wherein the method comprises administering the particles to the subject, wherein
   [0093] (a) each particle comprises a nucleic acid encoding a nuclease for targeting the genomes of E coli cells, wherein the said administered particles contact the cells and introduce therein the nucleic acid, wherein the nuclease is expressed in the cells and cuts genomic DNA of the cells, thereby killing the cells or reducing growth or proliferation of the cells in the subject;
   [0094] (b) the E coli cells are cells of E coli phylogroup B2; and
   [0095] (c) each particle comprises an adhesion moiety for recognising and binding to a cognate moiety selected from a LPS, LamB and Tsx displayed on the surface of the phylogroup B2 E coli cells.

### Optionally,

[0096] (i) each particle comprises a phage capsid containing the nucleic acid;
[0097] (ii) the particles of the composition target a plurality of different E coli genes, optionally selected from essential and virulence genes; and
[0098] (iii) the composition comprises
[0099] A: particles which comprise a LPS adhesion moiety and a LamB adhesion moiety;
[0100] B: particles which comprise a LPS adhesion moiety and a Tsx adhesion moiety; or
[0101] C: particles which comprise a Tsx adhesion moiety but is devoid of LamB and LPS adhesion moieties.

[0102] Optionally, the genomic DNA is chromosomal DNA of the cells. Additionally or alternatively, the genomic DNA is plasmid DNA of the cells.

[0103] Optionally, each particle comprises a nucleic acid encoding a nuclease for chromosomal targeting, wherein the said administered particles contact the cells and introduce therein the nucleic acid, wherein the nuclease is expressed in the cells and cuts the chromosomes of the cells, thereby killing the cells or reducing growth or proliferation of the cells in the subject.

[0104] The human may be a male or female. The human may be an adult or child. The human may be 18 years of age or older, eg, 40, 50, 60, 70 80 or older. The human may be younger than 18, eg, a teenager, eg, a baby, eg, up to 5 years of age, eg, up to 2 years of age. The animal may be a livestock or companion animal eg, a dog or cat). The animal may be a bird (eg, a poultry bird, eg, a chicken, turkey or duck, preferably a chicken), cow, sheep, goat or pig (eg, a neonatal swine or a swine under 6 months of age).

[0105] The infection may be a bloodstream infection. The infection may be a nosocomial infection.

[0106] In an example, each adhesion moiety is a tail fibre protein. In an example, each particle comprises a phage tail fibre that comprises or is fused to a said adhesion moiety. In an example, each adhesion moiety is an antibody fragment, eg, an antibody single variable domain. In an example, each adhesion moiety is a nanobody. In an example, each adhesion moiety comprises an antibody binding site that is capable of binding to the cognate moiety. For example, each adhesion moiety comprises an antibody single variable domain (ie, a dAb), such as a nanobody. In an example, each particle comprises one or more phage tail fibres or spikes, each fibre or spike comprising a said adhesion moiety.

[0107] For example, at least 2, 3 or 4 different types of said transduction particle are administered to the subject and each type comprises one or a plurality of types of tail fibres comprising adhesion moieties, wherein the other particle types do not comprise said one or plurality of tail fibre types. In an example, each type of said plurality of tail fibre types differs from the other types by the type of adhesion moiety it comprises.

[0108] Optionally, the particles comprise adhesion moieties for binding to LPS, LamB and Tsx. Optionally, the particles comprise adhesion moieties for binding to LamB and Tsx. Optionally, the particles comprise adhesion moieties for binding to LPS and Tsx. Optionally, the particles comprise adhesion moieties for binding to LPS and LamB.

[0109] In Gram-negative bacteria, the peptidoglycan layer is relatively thin and is located inward of the outer membrane, the major component of the cell wall. These two layers are connected by Braun's lipoproteins. The outer membrane is a sophisticated structure composed of a lipid bilayer ornamented with proteins, polysaccharides and lipids; the latter two molecules form the LPS layer. LPSs are complexes that consist of three parts: lipid A, the core polysaccharide and the O-polysaccharide. Lipid A is, in general, composed of fatty acids attached to glucosamine phosphate disaccharides. The core polysaccharide is connected to the lipid A through a ketodeoxyoctonate linker. The core polysaccharide and the O-polysaccharide (O-chain or O-antigen) contain several units of sugar residues extending outward to the outer membrane. Cells that contain all three components of the LPS are denominated as smooth(S) type and those that lack the O-polysaccharide portion are distinguished as rough (R) type.

[0110] Optionally, the LPS is smooth LPS or rough LPS.

[0111] For example, the particles comprise at least one type of particle whose adhesion moiety is capable of binding to O-antigen of LPS.

[0112] E coli is a very versatile species for which diversity has been explored from various perspectives highlighting, for example, phylogenetic groupings, pathovars as well as a wide range of O serotypes. The highly variable O-antigen, the most external part of the lipopolysaccharide component of the outer membrane of E coli, is linked to the innermost lipid A through the core region of LPS of which 5 different structures, denominated K-12, R1, R2, R3 and R4, have been characterized so far. Phylogroups B2 and C strains are mainly dominated by the R1 type. Strains within phylogroup B2 may carry a K-12 core, eg, belonging to the complex STc131, one of the major clone of extra-intestinal pathogenic E coli (ExPEC) strains.

[0113] Preferably, the LPS comprises a R1 core region. In an example, the LPS comprises a R2 core region. In an example, the LPS comprises a R3 core region. In an example, the LPS comprises a R4 core region. In an example, the LPS comprises a K-12 core region.

[0114] Optionally, the LamB comprises the amino acid of SEQ ID NO: 1 or an amino acid sequence that is at least 70, 80, 90 or 95% identical to SEQ ID NO: 1. Optionally, the Tsx comprises the amino acid of SEQ ID NO: 2 or an amino acid sequence that is at least 70, 80, 90 or 95% identical to SEQ ID NO: 2. Optionally, the LamB is encoded by the nucleotide sequence of SEQ ID NO: 3 or an amino acid sequence that is at least 70, 80, 90 or 95% identical to SEQ ID NO: 3. Optionally, the Tsx is encoded by the nucleotide sequence of SEQ ID NO: 4 or an amino acid sequence that is at least 70, 80, 90 or 95% identical to SEQ ID NO: 4.

[0115] The Escherichia coli tsx gene encodes an integral outer-membrane protein (Tsx) that functions as a substrate-specific channel for deoxynucleosides and the antibiotic albicidin. In an example, the Nucleoside-specific channel-forming protein Tsx of E coli has a Uniprot Accession Number of POA927 or is a homologue thereof. In an example, the maltose outer membrane porin (maltoporin) LamB of E coli has a Uniprot Accession Number of P02943 or is a homologue thereof.

[0116] Homologue: A gene, nucleotide or protein sequence related to a second gene, nucleotide or protein sequence by descent from a common ancestral DNA or protein sequence. The term, homologue, may apply to the relationship between genes separated by the event of or to the relationship between genes separated by the event of genetic duplication.

[0117] In an embodiment, the E coli cells comprise UPEC E coli. In an embodiment, the E coli cells comprise intestinal pathogenic E coli (ExPEC) cells.
[0118] 3. The composition or method of Embodiment 1 or 2 respectively, wherein the method is for treating or preventing infection of the subject by an E coli strain selected from the group ST131, ST1193, ST648, ST315, ST405, ST361, ST88 and ST453.

[0119] In a preferred example, the strain is ST1193. In another preferred example, the strain is ST131.
[0120] 4. The composition or method of any preceding Embodiment, wherein the method is for treating or preventing infection of the subject by a plurality of different phylogroup B2 strains of E coli; optionally wherein the plurality comprises E coli ST131 and ST1193 cells.

[0121] E coli ST131 and/or ST1193 have been found to be virulent and associated with fluoroquinolone resistance. As shown in the Example section herein, the invention is useful for treating or preventing infection by such strains. Optionally, said plurality of strains comprises E coli ST131 and/or ST1193 strains. Optionally, said plurality of strains comprises fluoroquinolone-resistant strains. For example, said plurality of strains comprises E coli ST131 and/or ST1193 fluoroquinolone-resistant strains. E coli strains B2-ST73 (CH24-30); B2-ST73 (CH24-103); B2-ST131 (CH40-30); B2-ST141 (CH52-5); B2-ST372 (CH103-9); B2-ST404 (CH14-27); B2-ST404 (CH14-807) and B2-ST1193 (CH14-64) have been found in UTI settings. In an embodiment (eg, wherein the subject is suffering from or at risk of UTI), the B2 E coli comprise one or more strains selected from B2-ST73 (CH24-30); B2-ST73 (CH24-103); B2-ST131 (CH40-30); B2-ST141 (CH52-5); B2-ST372 (CH103-9); B2-ST404 (CH14-27); B2-ST404 (CH14-807) and B2-ST1193 (CH14-64).
[0122] 5. The composition or method of any preceding Embodiment, wherein the subject is a transplant or cancer patient (optionally a haematological cancer patient), or wherein the patient is suffering from or at risk of a urinary tract infection (UTI); and optionally wherein the transplant is a solid organ or stem cell transplant (optionally a haematopoietic cell transplant) or wherein the transplant is a transplant of a medical device.

[0123] For example, the subject is a haematological cancer patient suffering from neutropenia. For example, the subject is a haematopoietic stem cell transplant patient.

[0124] A suitable medical device may be, eg, heart device (eg, ventricular assist device, such as a left ventricular assist device (LVAD)), a catheter (eg, a biliary catheter) or a prosthesis (eg, a joint) prosthesis.

[0125] In an example, the patient is suffering from a sequestered B2 phylogroup E coli infection. In an example, the E coli are sequestered B2 phylogroup E coli.

[0126] For example, the subject is suffering from or at risk of acute bacterial sinusitis, pneumonia, urinary tract infections, chronic prostatitis or gastroenteritis caused by B2 phylogroup E coli. For example, the subject is a male human prostate surgery patient.
[0127] 6. The composition or method of any preceding Embodiment, wherein the method is carried out prior to the subject receiving a transplant.
   [0128] For example, the transplant is a solid organ or stem cell transplant (optionally a haematopoietic cell transplant).
[0129] 7. The composition or method of any preceding Embodiment, wherein the B2 E coli cells comprise a strain of E coli that causes sepsis, septicaemia or diarrhoea in humans.

[0130] Enterohemorrhagic Escherichia coli (EHEC) serotype O157:H7 is a human pathogen responsible for outbreaks of bloody diarrhoea and haemolytic uremic syndrome (HUS) worldwide. Conventional antimicrobials trigger an SOS response in EHEC that promotes the release of the potent Shiga toxin that is responsible for much of the morbidity and mortality associated with EHEC infection. Cattle are a natural reservoir of EHEC, and approximately 75% of EHEC outbreaks are linked to the consumption of contaminated bovine-derived products. EHEC causes disease in humans but is asymptomatic in adult ruminants. Characteristics of E. coli serotype O157:H7 (EHEC) infection includes abdominal cramps and bloody diarrhoea, as well as the life-threatening complication haemolytic uremic syndrome (HUS). Currently there is a need for a treatment for EHEC infections (Goldwater and Bettelheim, 2012). The use of conventional antibiotics exacerbates Shiga toxin-mediated cytotoxicity. In an epidemiology study conducted by the Centers for Disease Control and Prevention, patients treated with antibiotics for EHEC enteritis had a higher risk of developing HUS (Slutsker et al., 1998). Additional studies support the contraindication of antibiotics in EHEC infection; children on antibiotic therapy for hemorrhagic colitis associated with EHEC had an increased chance of developing HUS (Wong et al., 2000; Zimmerhackl, 2000; Safdar et al., 2002; Tarr et al., 2005). Conventional antibiotics promote Shiga toxin production by enhancing the replication and expression of stx genes that are encoded within a chromosomally integrated lambdoid prophage genome. The approach of the present invention may rely on nuclease cutting of target cell genomic DNA. Stx induction also promotes phage-mediated lysis of the EHEC cell envelope, allowing for the release and dissemination of Shiga toxin into the environment (Karch et al., 1999; Matsushiro et al., 1999; Wagner et al., 2002). Thus, advantageously, the invention provides alternative means for treating B2 phylogroup EHEC in human and animal subjects. In an example, the subject (eg, a human) is suffering from or at risk of haemolytic uremic syndrome (HUS), eg, the subject is suffering from an E coli infection, such as an EHEC E coli infection.
[0131] 8. The composition or method of any preceding Embodiment for preventing haemolytic uremic syndrome (HUS), a UTI infection, sepsis, septicaemia or diarrhoea in the subject.
   [0132] The composition or method may be for treating or preventing a blood stream infection by pathogenic B2 phylogroup E coli cells in the subject.
[0133] 9. The composition or method of any preceding Embodiment, wherein each particle comprises a phage capsid containing the nucleic acid; optionally wherein the capsid comprises capsid proteins of a T-even (optionally T4) or lambda phage.

[0134] As is known the to the skilled addressee, transduction particles are operable to infect their cognate host cells to introduce therein nucleic acid by transduction.
[0135] 10. The composition or method of any preceding Embodiment, wherein each particle is a phage (optionally a lytic phage) or packaged phagemid.
[0136] 11. The composition or method of any preceding Embodiment, wherein at least 2, 3 or 4 different types of transduction particle are administered to the subject.

[0137] For example, each particle types comprises a type of adhesion moiety or collection of adhesion moiety types that differs from the other types of particles.

[0138] In an example, 2 different types of transduction particle are administered to the subject. In an example, 3 different types of transduction particle are administered to the subject. In an example, 4 different types of transduction particle are administered to the subject. In an example, 5 different types of transduction particle are administered to the subject. In an example, 6 different types of transduction particle are administered to the subject.
[0139] 12. The composition or method of any preceding Embodiment, wherein a first type of transduction particle and a second type of transduction particle are administered to the subject, wherein the first type of particle comprises a first adhesion moiety that is capable of recognising and binding to a first cognate moiety selected from the group LPS, LamB and Tsx displayed on B2 E coli, and the second type of particle comprises a second adhesion moiety that is capable of recognising and binding to a second cognate moiety selected from said group, wherein the first and second adhesion moieties different from each other.

[0140] For example, the first and second adhesion moieties different from each other by their tail fibres, optionally wherein the first adhesion moiety is cognate to LPS and the second moiety is cognate to LamB; or optionally wherein the first adhesion moiety is cognate to LPS and the second moiety is cognate to Tsx; optionally wherein the first adhesion moiety is cognate to Tsx and the second moiety is cognate to LamB.

[0141] For example, each particle comprises a phage capsid containing a said nucleic acid; wherein at least 2, 3 or 4 different types of transduction particle are administered to the subject; and wherein a first type of transduction particle and a second type of transduction particle are administered to the subject, wherein the first type of particle comprises a first adhesion moiety that is capable of recognising and binding to a first cognate moiety selected from the group LPS, LamB and Tsx displayed on B2 E coli, and the second type of particle comprises a second adhesion moiety that is capable of recognising and binding to a second cognate moiety selected from said group, wherein the first and second adhesion moieties different from each other.

[0142] For example, each particle comprises a phage capsid containing a said nucleic acid; wherein at least 2, 3 or 4 different types of transduction particle are administered to the subject; and wherein a first type of transduction particle and a second type of transduction particle are administered to the subject, wherein the first type of particle comprises a first adhesion moiety that is capable of recognising and binding to LPS displayed on B2 E coli, and the second type of particle comprises a second adhesion moiety that is capable of recognising and binding to LamB displayed on B2 E coli.

[0143] For example, each particle comprises a phage capsid containing a said nucleic acid; wherein at least 2, 3 or 4 different types of transduction particle are administered to the subject; and wherein a first type of transduction particle and a second type of transduction particle are administered to the subject, wherein the first type of particle comprises a first adhesion moiety that is capable of recognising and binding to Tsx displayed on B2 E coli, and the second type of particle comprises a second adhesion moiety that is capable of recognising and binding to LamB displayed on B2 E coli.

[0144] For example, each particle comprises a phage capsid containing a said nucleic acid; wherein at least 2, 3 or 4 different types of transduction particle are administered to the subject; and wherein a first type of transduction particle and a second type of transduction particle are administered to the subject, wherein the first type of particle comprises a first adhesion moiety that is capable of recognising and binding to LPS displayed on B2 E coli, and the second type of particle comprises a second adhesion moiety that is capable of recognising and binding to Tsx displayed on B2 E coli.

[0145] For example, each particle comprises a phage capsid containing a said nucleic acid; wherein at least 3 different types of transduction particle are administered to the subject; and wherein a first type of transduction particle, a second type of transduction particle and a third type of transduction particle are administered to the subject, wherein the first type of particle comprises a first adhesion moiety that is capable of recognising and binding to LPS displayed on B2 E coli, the second type of particle comprises a second adhesion moiety that is capable of recognising and binding to LamB displayed on B2 E coli, and the third type of particle comprises a second adhesion moiety that is capable of recognising and binding to Tsx displayed on B2 E coli.

[0146] For example, each particle comprises a phage capsid containing a said nucleic acid; wherein at least 4 different types of transduction particle are administered to the subject; and wherein a first type of transduction particle, a second type of transduction particle, a third type of transduction particle and a fourth type of transduction particle are administered to the subject, wherein the first type of particle comprises a first adhesion moiety that is capable of recognising and binding to LPS displayed on B2 E coli, the second type of particle comprises a second adhesion moiety that is capable of recognising and binding to LamB displayed on B2 E coli, the third type of particle comprises a second adhesion moiety that is capable of recognising and binding to Tsx displayed on B2 E coli, and the fourth type of particle comprises a second adhesion moiety that is capable of recognising and binding to LPS displayed on B2 E coli, wherein the adhesion moieties of said particles are different from each other.

[0147] For example, each particle comprises a phage capsid containing a said nucleic acid; wherein at least 4 different types of transduction particle are administered to the subject; and wherein a first type of transduction particle, a second type of transduction particle, a third type of transduction particle and a fourth type of transduction particle are administered to the subject, wherein the first type of particle comprises a first adhesion moiety that is capable of recognising and binding to LPS displayed on B2 E coli, the second type of particle comprises a second adhesion moiety that is capable of recognising and binding to LamB displayed on B2 E coli, the third type of particle comprises a second adhesion moiety that is capable of recognising and binding to Tsx displayed on B2 E coli, and the fourth type of particle comprises a second adhesion moiety that is capable of recognising and binding to LamB displayed on B2 E coli, wherein the adhesion moieties of said particles are different from each other.

[0148] For example, each particle comprises a phage capsid containing a said nucleic acid; wherein at least 4 different types of transduction particle are administered to the subject; and wherein a first type of transduction particle, a second type of transduction particle, a third type of transduction particle and a fourth type of transduction particle are administered to the subject, wherein the first type of particle comprises a first adhesion moiety that is capable of recognising and binding to LPS displayed on B2 E coli, the second type of particle comprises a second adhesion moiety that is capable of recognising and binding to LamB displayed on B2 E coli, the third type of particle comprises a second adhesion moiety that is capable of recognising and binding to Tsx displayed on B2 E coli, and the fourth type of particle comprises a second adhesion moiety that is capable of recognising and binding to Tsx displayed on B2 E coli, wherein the adhesion moieties of said particles are different from each other.
[0149] 13. The composition or method of Embodiment 12, wherein the first and second cognate moieties are different from each other.

[0150] In an alternative, the first and second cognate moieties are identical. In an alternative, the first and second cognate moieties are LPS. In an alternative, the first and second cognate moieties are Tsx. In an alternative, the first and second cognate moieties are LamB.
[0151] 14. The composition or method of any preceding Embodiment, wherein the nucleic acid of each particle comprises a nucleotide sequence (N1) encoding said nuclease, wherein each particle is a synthetic T-even phage (optionally a T4 phage) comprising an insertion of N1 into the genome of the phage, wherein the region is between the pin (protease inhibitor) gene and the iPII (internal protein) gene.

[0152] Optionally, the phage is
[0153] (a) a synthetic T-even (eg, a T4) phage that comprises a deletion of DNA from, and/or an insertion of heterologous DNA into, a region of the genome of the phage corresponding to a region between coordinates
   [0154] (i) 1887 and 8983;
   [0155] (ii) 2625 and 8092;
   [0156] (iii) 1904 and 8113;
   [0157] (iv) 2668 and 7178;
   [0158] (v) 7844 and 11117;
   [0159] (vi) 8643 and 10313;
   [0160] (vii) 9231 and 13383;
   [0161] (viii) 9480 and 12224;
   [0162] (ix) 8454 and 17479; or
   [0163] (x) 9067 and 16673;
      wherein coordinates are with reference to wild-type T4 phage genome (SEQ ID NO: 5);
[0164] 15. The composition or method of any preceding Embodiment, wherein said nuclease is a guided nuclease, optionally a Cas, meganuclease, zinc finger nuclease or TALEN.
[0165] 16. The composition or method of any preceding Embodiment, wherein the nuclease is a Type I, II, III, IV, V or VI nuclease, optionally a Cas9 or a Cas3.
[0166] 17. The composition or method of any preceding Embodiment, wherein at least 1×10⁷ PFU of particles are administered to the subject.

[0167] In an example, 1×10⁸ to 1×10¹³ PFU of particles are administered to the subject. In an example, 1×10⁸ to 1×10¹² PFU of particles are administered to the subject. In an example, 1×10¹⁰ to 1×10¹² PFU of particles are administered to the subject.
[0168] 18. The composition or method of any preceding Embodiment, wherein the particles are administered to the subject at an MOI (multiplicity of infection) of at least 0.01.

[0169] Optionally, the particles are administered to the subject at an MOI of no more than 1. Optionally, the particles are administered to the subject at an MOI from 0.001 to 1. Optionally, the particles are administered to the subject at an MOI from 0.01 to 1. Optionally, the particles are administered to the subject at an MOI from 0.1 to 1.
[0170] 19. The composition or method of any preceding Embodiment, wherein the strain or at least one strain is an antibiotic-resistant or MDR strain; and/or wherein the strain or at least one strain is a B2-I strain.

[0171] For example, the strain or at least one strain is a strain selected from B2-I (STc131), B2-II, B2-IX, and B2-VI.

[0172] For example, at least one MDR strain is resistant to fluoroquinolone and the strain is a beta-lactamase (ESBL)-producing E coli.
[0173] 20. The composition or method of Embodiment 19, wherein the antibiotic is fluoroquinolone (optionally levofloxacin), carbapenem or vancomycin; and/or wherein the E coli are beta-lactamase (ESBL)-producing E coli.

[0174] Optionally, the antibiotic is selected from ciprofloxacin (eg, Cipro™), gemifloxacin (eg, Factive™), levofloxacin (eg, Levaquin™), moxifloxacin (eg, Avelox™), and ofloxacin.

[0175] For example, the E coli produce CTX-M-15. CTX-M-15 is the most abundant enzyme in ESBL-producing E. coli causing human infections.

[0176] Preferably, the antibiotic is fluoroquinolone (FQ). For example, the FQ is levofloxacin. Levofloxacin, sold under the brand name Levaquin™ among others, is an antibiotic medication. It is used to treat a number of bacterial infections including acute bacterial sinusitis, pneumonia, urinary tract infections, chronic prostatitis, and some types of gastroenteritis. Levofloxacin prophylaxis is recommended to prevent gram-negative bloodstream infections (BSIs) in patients with prolonged chemotherapy-induced neutropenia. However, increasing fluoroquinolone resistance may decrease the effectiveness of this approach (eg, Clin Infect Dis. 2021 Oct. 5; 73 (7): 1257-1265. doi: 10.1093/cid/ciab404, “Colonization With Fluoroquinolone-Resistant Enterobacterales Decreases the Effectiveness of Fluoroquinolone Prophylaxis in Hematopoietic Cell Transplant Recipients, Michael J Satlin et al). This study found that in the patients tested, nearly one-third of hematopoietic cell transplantation (HCT) recipients with pretransplant fluoroquinolone-resistant Enterobacterales (FQRE) colonization developed gram-negative bloodstream infections (BSIs) while receiving levofloxacin prophylaxis, and infections were typically caused by their colonizing strains. In contrast, levofloxacin prophylaxis was highly effective in patients not initially colonized with FQRE. The authors found that 23% of patients admitted for HCT were colonized with FORE and E. coli was the predominant species. Patients with hematologic malignancies who receive intensive chemotherapy, including those undergoing hematopoietic cell transplantation (HCT), frequently develop severe neutropenia and gastrointestinal mucositis, placing them at high risk of developing bloodstream infections (BSIs) from gram-negative enteric bacteria (Enterobacterales). Neutropenic patients often suffer severe consequences from BSIs caused by Enterobacterales, with mortality rates as high as 15%-20%. Moreover, many fluoroquinolone-resistant Enterobacterales (FQRE) also harbor extended-spectrum β-lactamases (ESBLs); thus, breakthrough infections that occur despite fluoroquinolone prophylaxis may be resistant to first-line antimicrobial therapies for fever and neutropenia. Finally, adverse effects of fluoroquinolones have become increasingly apparent, including Clostridioides difficile infection, aortic dissection and rupture, dysglycemia, tendinopathy, QT interval prolongation, and mental status changes. Thus, fluoroquinolones should only be administered to patients when they are likely to provide clinical benefit to justify these potential adverse effects. Thus, Although fluoroquinolones may decrease the risk of gram-negative BSI in many patients, those who are colonized with FQRE may not benefit from fluoroquinolone prophylaxis.

[0177] The high rate and absence of risk factors for FQRE colonization suggest that FQRE are prevalent in the community. Indeed, a study of urinary isolates among outpatients in the United States demonstrated that 12% of E. coli isolates from young women and 29% of E. coli isolates from elderly women were fluoroquinolone resistant. A surveillance study of 1831 urinary E. coli isolates from 2017 found that one-quarter were FQ resistant. Furthermore, 13%-16% of men undergoing transrectal prostate biopsies were found to be colonized with fluoroquinolone-resistant E. coli. Nearly one-half of fluoroquinolone-resistant E coli isolates in the study were ST131, a common sequence type that has spread throughout the world and whose isolates are frequently fluoroquinolone resistant and ESBL producers.

[0178] Bacteraemia caused by extended-spectrum β-lactamase (ESBL)-producing Enterobacteriaceae (ESBL-E), such as E coli, is associated with inadequate empirical therapy and substantial mortality in neutropenic patients (see eg, “Colonization With Levofloxacin-resistant Extended-spectrum β-Lactamase-producing Enterobacteriaceae and Risk of Bacteremia in Hematopoietic Stem Cell Transplant Recipients”, Satlin M J et al, Clin Infect Dis. 2018 Nov. 13; 67 (11): 1720-1728. doi: 10.1093/cid/ciy363). The study found that HSCT recipients who are colonized with levofloxacin-resistant ESBL-E pre-transplant and receive levofloxacin prophylaxis have high rates of bacteraemia from their colonizing strain during neutropenia. In this single-centre study of 312 HSCT recipients, it was found that 10% of patients were colonized with ESBL-E prior to their transplant. Nearly one-third of patients with pre-transplant ESBL-E colonization developed subsequent ESBL-E bacteraemia while neutropenic after their transplant, compared to <1% of patients who were not initially colonized with ESBL-E. Furthermore, the bloodstream and gastrointestinal ESBL-E had identical MLST and PFGE profiles in all cases, suggesting that these patients developed bacteraemia from their colonizing isolates.

[0179] In an example, the composition or method of the invention is for preventing the translocation of B2 phylogroup E coli from the gastrointestinal tract to the blood stream of the subject, thereby preventing or reducing bacteriaemia in the patient.

[0180] In an example, the composition or method of the invention is for preventing the translocation of B2 phylogroup E coli from the urinary tract to the blood stream of the subject, thereby preventing or reducing bacteriaemia in the patient.

[0181] In an example, the E coli are comprised by the gastrointestinal tract of the subject. Optionally, in these examples, the composition is administered orally to the subject.

[0182] In another example, the E coli are comprised by the urinary tract of the subject. For example, the infection is a kidney, bladder or urethra infection. Optionally, in these examples, the composition is administered to the urinary tract of the subject, such as by a catheter.
[0183] 21. The composition or method of any preceding Embodiment, wherein
   [0184] (i) the nuclease is a Cas,
   [0185] (ii) each particle comprises a phage capsid containing the nucleic acid; and
   [0186] (iii) wherein a first type of transduction particle and a second type of transduction particle are administered to the subject, wherein the first type of particle comprises a first adhesion moiety that is capable of recognising and binding to a first cognate moiety selected from the group LPS, LamB and Tsx displayed on B2 strain E coli, and the second type of particle comprises a second adhesion moiety that is capable of recognising and binding to a second cognate moiety selected from said group, wherein the first and second adhesion moieties different from each other.
[0187] 22. A method for treating or preventing an infection by E coli cells in a human or animal subject, the method comprising administering to the subject a plurality of transduction particles, wherein
   [0188] (a) each particle comprises a nucleic acid encoding a crRNA or guide RNA that is operable with a Cas nuclease for chromosomal targeting in the cells, wherein the said administered particles contact the cells and introduce therein the nucleic acid, wherein the crRNA or guide RNA is expressed and guides the Cas nuclease wherein the nuclease cuts the chromosomes of the cells, thereby killing the cells or reducing growth or proliferation of the cells in the subject;
   [0189] (b) the E coli cells are cells of E coli phylogroup B2; and
   [0190] (c) each particle comprises an adhesion moiety for recognising and binding to a cognate moiety selected from a LPS, LamB and Tsx displayed on the surface of the phylogroup B2 E coli cells.

[0191] Each nucleic acid preferably encodes a plurality of different cRNAs comprising spacer sequences that target E coli chromosomal genes. For example, Each nucleic acid preferably encodes a plurality of different cRNAs comprising spacer sequences that target 2, 3 or 4 E coli chromosomal genes selected from fimH, bolA, rpoH, lptA and murA.

[0192] Optionally, each crRNA or guide RNA comprises a spacer that targets an E coli gene selected from the group fimH, bolA, rpoH, lptA and murA. Optionally, each nucleic acid encodes a plurality of different cRNAs or guide RNAs, wherein the cRNAs or guide RNAs target at least 2, 3 or 4 (or targets all of) E coli genes selected from the group fimH, bolA, rpoH, lptA and murA. Optionally, each nucleic acid encodes a plurality of different cRNAs or guide RNAs, wherein the cRNAs or guide RNAs target fimH and bolA. Optionally, each nucleic acid encodes a plurality of different cRNAs or guide RNAs, wherein the cRNAs or guide RNAs target rpoH and lptA. Optionally, each nucleic acid encodes a plurality of different cRNAs or guide RNAs, wherein the cRNAs or guide RNAs target fimH and murA. Optionally, each crRNA or guide RNA comprises a spacer sequence that is complementary to an E coli gene selected from the group fimH, bolA, rpoH, lptA and murA. Optionally, each crRNA or guide RNA comprises a spacer sequence that is at least 80, 90 or 95% identical to a nucleotide sequence selected from the group SEQ ID NO: 6-10.

[0193] Optionally, each nucleic acid encodes a first crRNA, second crRNA, third crRNA, fourth crRNA and fifth cRNA, wherein the cRNAs are different from each other and each crRNA targets a B2 phylogroup E coli gene. Optionally, each nucleic acid encodes a first crRNA, second crRNA, third crRNA, fourth crRNA and fifth cRNA, wherein the cRNAs are different from each other and each crRNA is complementary to a B2 phylogroup E coli gene. Optionally, each nucleic acid encodes a first crRNA, second crRNA, third crRNA, fourth crRNA and fifth cRNA, wherein the cRNAs comprise respectively SEQ ID NO: 6, SEQ ID NO: 7, SEQ ID NO: 8, SEQ ID NO: 9 and SEQ ID NO: 10. Optionally, each nucleic acid encodes a first crRNA, second crRNA, third crRNA, fourth crRNA and fifth cRNA, wherein the cRNAs comprise respectively a nucleotide sequence that is at least 80% identical to SEQ ID NO: 6, a nucleotide sequence that is at least 80% identical to SEQ ID NO: 7, a nucleotide sequence that is at least 80% identical to SEQ ID NO: 8, a nucleotide sequence that is at least 80% identical to SEQ ID NO: 9 and a nucleotide sequence that is at least 80% identical to SEQ ID NO: 10. Optionally, each nucleic acid encodes a first crRNA, second crRNA, third crRNA, fourth crRNA and fifth cRNA, wherein the cRNAs comprise respectively a nucleotide sequence that is at least 90% identical to SEQ ID NO: 6, a nucleotide sequence that is at least 90% identical to SEQ ID NO: 7, a nucleotide sequence that is at least 90% identical to SEQ ID NO: 8, a nucleotide sequence that is at least 90% identical to SEQ ID NO: 9 and a nucleotide sequence that is at least 90% identical to SEQ ID NO: 10. Optionally, each nucleic acid encodes a first crRNA, second crRNA, third crRNA, fourth crRNA and fifth cRNA, wherein the cRNAs comprise respectively a nucleotide sequence that is at least 95, 96, 97, 98 or 99% identical to SEQ ID NO: 6, a nucleotide sequence that is at least 95, 96, 97, 98 or 99% identical to SEQ ID NO: 7, a nucleotide sequence that is at least 95, 96, 97, 98 or 99% identical to SEQ ID NO: 8, a nucleotide sequence that is at least 95, 96, 97, 98 or 99% identical to SEQ ID NO: 9 and a nucleotide sequence that is at least 95, 96, 97, 98 or 99% identical to SEQ ID NO: 10.
[0194] 23. The method of Embodiment 22, wherein the method is according to any one of Embodiments 1-20, optionally except that the nuclease is an endogenous nuclease of the cells and is not encoded by the nucleic acid comprised by the particles.
[0195] 24. A composition comprising a plurality of transduction particles for use in a method of treating or preventing an infection by E coli cells in a human or animal subject according to Embodiment 22 or 23, wherein
   [0196] (a) each particle comprises a nucleic acid encoding a crRNA or guide RNA that is operable with a Cas nuclease for chromosomal targeting in the cells, wherein the said administered particles contact the cells and introduce therein the nucleic acid, wherein the crRNA or guide RNA is expressed and guides the Cas nuclease wherein the nuclease cuts the chromosomes of the cells, thereby killing the cells or reducing growth or proliferation of the cells in the subject;
   [0197] (b) the E coli cells are cells of E coli phylogroup B2; and
   [0198] (c) each particle comprises an adhesion moiety for recognising and binding to a cognate moiety selected from a LPS, LamB and Tsx displayed on the surface of the phylogroup B2 E coli cells.
[0199] 25. A method of detecting the presence of a B2 phylogroup E coli in a sample, the method comprising contacting the sample comprising B2 phylogroup E coli with a composition comprising a plurality of transduction particles, wherein
   [0200] (a) each particle comprises a nucleic acid encoding a nuclease for targeting the genomes of said E coli cells, wherein the said administered particles contact the cells and introduce therein the nucleic acid, wherein the nuclease is expressed in the cells and cuts genomic DNA of the cells, thereby killing the cells or reducing growth or proliferation of the cells in the subject;
   [0201] (b) each particle comprises an adhesion moiety for recognising and binding to a cognate moiety selected from a LPS, LamB and Tsx displayed on the surface of the phylogroup B2 E coli cells; and
   [0202] (c) the method comprises detecting that B2 phylogroup E coli cells have been killed or the growth or proliferation thereof has been reduced.
[0203] 26. A method of detecting the presence of a B2 phylogroup E coli in a sample, the method comprising contacting the sample comprising B2 phylogroup E coli with a composition comprising a plurality of transduction particles, wherein
   [0204] (a) each particle comprises a nucleic acid comprising or encoding a detectable label, wherein the said administered particles contact the cells and introduce therein the nucleic acid, wherein optionally the label is expressed in the cells;
   [0205] (b) each particle comprises an adhesion moiety for recognising and binding to a cognate moiety selected from a LPS, LamB and Tsx displayed on the surface of the phylogroup B2 E coli cells; and
   [0206] (c) the method comprises detecting B2 phylogroup E coli cells comprising the label.
[0207] 27. The method of Embodiment 26 or 27, wherein the composition comprises the features of the composition of any one of Embodiments 1, 2-21 24 and 25.
[0208] 28. The method of any one of Embodiments 26-28, wherein the E coli comprise one or more E coli strains selected from the group ST131, ST1193, ST648, ST315, ST405, ST361, ST88 and ST453.
[0209] 29. The method of any one of Embodiments 26-29, wherein the sample is a patient sample (eg, blood, urine, stool or saliva sample), wherein the subject is a transplant or cancer patient (optionally a haematological cancer patient), or wherein the patient is suffering from or at risk of a urinary tract infection (UTI); and optionally wherein the transplant is a solid organ or stem cell transplant (optionally a haematopoietic cell transplant).
[0210] 30. The method of any one of Embodiments 26-30, wherein the nucleic acid of each particle comprises a nucleotide sequence (N1) encoding said nuclease, or comprising or encoding the label wherein each particle is a synthetic T-even phage (optionally a T4 phage) comprising an insertion of N1 into the genome of the phage, wherein the region is between the pin (protease inhibitor) gene and the iPII (internal protein) gene.
[0211] 31. The method of any one of Embodiments 26-31, wherein at least 1×10⁷ PFU of particles are contacted with the sample.
[0212] 32. The method of any one of Embodiments 26-32, wherein the particles are contacted with the sample at an MOI (multiplicity of infection) of at least 0.01.

[0213] Labelling for detection methods is routine for the skilled addressee. The label may, for example, be a fluorescence label, eg, GFP. The sample may be a blood, spit, sputum or cell sample.

### Concepts

[0214] The invention also provides the following Concepts, which are fully supported by Example 2. All Concepts can be combined with any other features disclosed herein.

[0215] Patients with hematological malignancies frequently develop bloodstream infections due to translocation of E. coli and other bacteria from the gut. Antibiotic treatment to prevent these infections has detrimental effects on the microbiome and immune tonus and is further hampered by increasing antibiotic resistance, in particular towards fluroquinolones. As described in Example 2, compositions of the Concepts may target bacteria in biofilms, reduce the emergence of phage-tolerant E. coli and out-compete their ancestral WT phages in co-culture experiments. Compositions are provided with broad host-range across the E. coli phylogeny, including multi-drug resistant strains (B2 phylogroup). Compositions comprising different particles as per the Concepts may surprisingly reduce E. coli load in the murine gut better than individual constituent particles. The compositions, methods and doses of the Concepts find utility to selectively kill E. coli which may cause fatal infections in hematological cancer, transplant or UTI patients. The compositions, methods and doses also find utility for treating or preventing E coli blood stream infection.

[0216] To this end, there is provided:—

### Concept A:

[0217] A composition comprising a plurality of different types of transduction particles, wherein each of said particles comprises a nucleic acid and said particles are capable of contacting E coli cells and introducing therein the nucleic acid, wherein
[0218] (a) said nucleic acid of each particle comprises a nucleotide sequence encoding a product of interest (POI), wherein the nucleic acid is capable of expressing the POI in an E coli cell;
[0219] (b) each particle comprises an adhesion moiety for recognising and binding to a cognate moiety selected from a LPS, LamB and Tsx (optionally selected from LPS and Tsx) displayed on the surface of E coli cells; and
[0220] (c) said plurality of different types of transduction particles comprises (i) a first type of particles that comprise a LPS adhesion moiety; and (ii) a second type of particles that comprise a Tsx adhesion moiety.

### Concept B:

[0221] A composition comprising a plurality of transduction particles for use in a method of treating or preventing an infection by E coli cells in a human or animal subject, wherein the method comprises administering the particles to the subject, wherein
[0222] (a) each particle comprises a nucleic acid encoding a nuclease for targeting the genomes of E coli cells, wherein the said administered particles contact the cells and introduce therein the nucleic acid, wherein the nuclease is expressed in the cells and cuts genomic DNA of the cells, thereby killing the cells or reducing growth or proliferation of the cells in the subject;
[0223] (b) the E coli cells are cells of E coli phylogroup B2; and
[0224] (c) each particle comprises an adhesion moiety for recognising and binding to a cognate moiety selected from a LPS, LamB and Tsx (optionally selected from LPS and Tsx) displayed on the surface of the phylogroup B2 E coli cells.

### Concept C:

[0225] A composition comprising a plurality of transduction particles for use in a method of treating or preventing an infection by E coli cells (optionally B2 phylogroup E coli cells) in a human or animal subject, wherein the method comprises administering the particles to the subject, wherein (a) each particle comprises a nucleic acid encoding a nuclease for targeting the genomes of E coli cells, wherein the said administered particles contact the cells and introduce therein the nucleic acid, wherein the nuclease is expressed in the cells and cuts genomic DNA of the cells, thereby killing the cells or reducing growth or proliferation of the cells in the subject; and
[0226] (b) each particle comprised by the composition is a T-even phage capsid; optionally a capsid of a T2 phage, T2-like phage, RB69 phage or a RB69-like phage.

[0227] The following features are optional features that are combinable with the Concepts above or any other Configuration, example, embodiment or option herein.

[0228] Optionally,
[0229] A: each particle of the first type comprises a LPS adhesion moiety and a LamB adhesion moiety;
[0230] B: each particle of the first type comprises a LPS adhesion moiety and a Tsx adhesion moiety; or
[0231] C: each particle of the second type comprises a Tsx adhesion moiety but is devoid of LamB and LPS adhesion moieties.

[0232] Optionally, the composition comprises particles according to A, B and C.

[0233] Optionally, each particle comprises a phage capsid containing the nucleic acid. In an embodiment, the capsid comprises capsid proteins of a T-even (optionally T2) or lambda phage.

[0234] Optionally, the capsid of each particle comprised by the composition is a T-even phage capsid; optionally a capsid of a T2 phage, T2-like phage, RB69 phage or a RB69-like phage.

[0235] Optionally, each particle is a phage (optionally a lytic phage) or packaged phagemid.

[0236] Optionally, the composition comprises at least 3 or 4 different types of transduction particles. In an embodiment the composition has 4 (but no more than 4) different types of transduction particles.

[0237] Optionally, the nucleic acid of each particle comprises at least one nucleotide sequence (N1) encoding said POI, wherein each particle is a synthetic T-even phage comprising an insertion of N1 into a Modification Permissive Region (MPR) of the genome of the phage, wherein the MPR is immediately after gene 49 and to gene E when compared to a reference wild-type T2 phage. The nucleic acid may comprise a DNA deletion of phage DNA in the MPR. The insertion may comprise up to 5000, 6000, 7000 or 8000 bp of DNA and/or the deletion comprises up to 5000, 6000, 7000 or 8000 bp of DNA. The MPR may comprise contiguous DNA between said gene 49 and gene E, wherein the contiguous DNA is at least 1000 bp in length; or wherein the MPR comprises at least 100 bp of DNA between said gene 49 and gene E.

[0238] Optionally a T-even phage herein is a phage selected from T2, T4 or T6 phage; or comprises a genome that is at least 95% identical to the genome of a said selected phage. This percentage may be at least 96, 97, 98 or 99%.

[0239] The composition of any one of claims 8-11, wherein the synthetic phage genome comprises said insertion between coordinates 9000 and 21000, wherein the coordinates are the nucleotide positions counted from the nucleotide (coordinate number 1) immediately after gene 49 towards gene E when compared to a reference wild-type T2 phage. Optionally, the insertion is between coordinates 10300 and 19800, eg, between 10359 and 19810 with reference to the T2 genome.

[0240] Optionally, the insertion is in a window selected from the following windows (numbers being coordinates with reference to the T2 genome):—
[0241] 9000-21000; 10000-21000, 10100-21000, 10200-21000, 10300-21000, 10400-21000, 10500-21000, 11000-21000, 15000-21000;
[0242] 9000-20000; 10000-20000, 10100-20000, 10200-20000, 10300-20000, 10400-20000, 10500-20000, 11000-20000, 15000-20000;
[0243] 9000-19500; 10000-19500, 10100-19500, 10200-19500, 10300-19500, 10400-19500, 10500-19500, 11000-19500, 15000-19500;
[0244] 9000-19000; 10000-19000, 10100-19000, 10200-19000, 10300-19000, 10400-19000, 10500-19000, 11000-19000, 15000-19000;
[0245] 9000-18000; 10000-18000, 10100-18000, 10200-18000, 10300-18000, 10400-18000, 10500-18000, 11000-18000 and 15000-18000.

[0246] Optionally, the nuclease is a dsDNA nuclease, ie, is capable of cutting dsDNA. Optionally, the nuclease is a nickase, eg, a Cas9 nickase.

[0247] In an embodiment, the POI is a protein. In an embodiment, the POI is an RNA, eg, a crRNA.

[0248] Optionally, the POI comprises
[0249] (a) a nuclease for targeting the DNA of an E coli cell, wherein the nuclease is capable of being expressed in the cell for cutting the DNA of the cell, thereby modifying or killing the cell; or
[0250] (b) a dead Cas (dCas) for targeting the DNA of an E coli cell, wherein the dCas is capable of being expressed in the cell and targeting the DNA of the cell, thereby modifying the cell.

[0251] Optionally, when (a) applies, said nuclease is a guided nuclease, optionally a Cas, meganuclease, zinc finger nuclease or TALEN; or when (b) applies, the dCas is a dCas9.

[0252] The nuclease may be a Type I, II, III, IV, V or VI Cas nuclease, optionally a Cas9 or a Cas3.

[0253] In a preferred embodiment, the nucleic acid comprises (optionally in 5′ to 3′ order) a cas3 gene (ygcB) and a cognate cascade gene complex comprising casA (ygcL, cas8e), casB (ygcK, cas11), casC (ygcJ, cas7), casD (ygcI, cas5), and casE (ygcH, cas6), and optionally a CRISPR array or nucleotide sequence encoding a guide RNA that targets an E. coli genome.

[0254] In a preferred embodiment, POI comprises at least one crRNA or guide RNA that is operable with a Cas for DNA targeting in E coli cells. Optionally, each crRNA or guide RNA comprises a spacer sequence that is complementary to an E coli protospacer sequence; optionally a protospacer of a B2 phylogroup E coli cell or an E coli cell of a strain selected from the group ST131, ST1193, ST648, ST315, ST405, ST361, ST88 and ST453.

[0255] Each nucleic acid preferably encodes a plurality of different cRNAs comprising spacer sequences that target E coli chromosomal genes. For example, Each nucleic acid preferably encodes a plurality of different cRNAs comprising spacer sequences that target 2, 3 or 4 E coli chromosomal genes selected from fimH, bolA, rpoH, lptA and murA. In an embodiment, the composition of the invention comprises a type of transduction particle that targets E coli genes bolA, rpoH and fimH. Additionally or alternatively, the composition of the invention comprises a type of transduction particle that targets E coli genes lptA and murA. Optionally, the composition comprises a first type of transduction particle that targets E coli genes bolA, rpoH and fimH; and a second type of transduction particle that targets E coli genes lptA and murA. Optionally, the first type of particle is according any other first type of particle herein which comprises a LPS adhesion moiety (eg, comprises LPS and Tsx adhesion moieties). Optionally, the second type of particle is according any other first type of particle herein which comprises a Tsx adhesion moiety. Optionally, the second type of particle comprises a LPS adhesion moiety (eg, comprises LPS and LamB adhesion moieties).

[0256] The protospacer sequence may comprised by a gene selected from E coli genes fimH, bolA, rpoH. lptA and murA.

[0257] In an embodiment, the particles of the composition target all of E coli genes fimH, bolA, rpoH, lptA and murA.

[0258] The nucleotide sequence encoding the POI may comprise a stress-phase active (SPA) promoter for expression of the POI in E coli cells. The promoter may be an E coli bolA promoter. The promoter may comprise SEQ ID NO: 13.

[0259] In an embodiment, the E coli cells comprise a strain of E coli that causes sepsis, septicaemia or diarrhoea in humans or animals.

[0260] Optionally, the E coli cells are GI tract cells. Optionally, the E coli cells are comprised by a gut microbiome. Optionally, the E coli cells are comprised by blood of the subject. Optionally, the E coli cells are comprised by a urinary tract of the subject. Optionally, the E coli cells are comprised by a microbiome selected from a GI tract (eg, stomach), blood, urinary tract, mouth, nose, eye, ear, skin, anus or hair microbiome.

[0261] In an embodiment, the composition is for use in a method of treating or preventing infection of by E coli cells in a human or animal subject, wherein the method comprises administering the particles to the subject.

[0262] Optionally, the method is for preventing the translocation of B2 phylogroup E coli from the gastrointestinal or urinary tract to the blood stream of the subject, thereby preventing or reducing bacteriaemia in the subject.

[0263] Optionally, the method is for preventing E coli infection in a subject at risk of febrile neutropenia. The subject may be a cancer patient, such as a haematological cancer patient. The infection may be a bloodstream infection in the subject. Thus, in an embodiment, the method is for preventing a bloodstream E coli infection in a subject at risk of febrile neutropenia, wherein the subject is a human cancer patient, such as a haematological cancer patient.

[0264] There is provided:—

[0265] A method of treating or preventing sepsis, septicaemia or diarrhoea in a human or animal subject, the method comprising administering to the subject the composition described herein (eg, the composition of Concept A, B or C), wherein the E coli cells comprise a strain of E coli that causes sepsis, septicaemia or diarrhoea in humans or animals.

[0266] A method of treating or preventing infection of by E coli cells in a human or animal subject, wherein the method comprises administering the composition described herein (eg, the composition of Concept A, B or C) to the subject, wherein the infection is treated or prevented.

[0267] The infection may be reduced or eliminated. The infection may be reduced by at least 20, 30, 40, 50, 601 70, 80 or 90%.

[0268] The subject may be a transplant or cancer patient (optionally a haematological cancer patient), or wherein the patient is suffering from or at risk of a urinary tract infection (UTI). Optionally, the transplant is a solid organ or stem cell transplant (optionally a haematopoietic cell transplant) or wherein the transplant is a transplant of a medical device. The subject may be suffering from a haematological cancer, eg, leukaemia. The subject (eg, cancer patient) may be at risk of neutropenia or may be suffering from neutropenia. Preferably, the subject is suffering from a haematological cancer, eg, leukaemia, and is at risk of neutropenia or suffering from neutropenia.

[0269] Optionally, the method is carried out prior to the subject receiving a or said transplant. The transplant may be a stem cell transplant, eg, when the subject is a cancer patient.

[0270] The composition or method may be for preventing haemolytic uremic syndrome (HUS), a UTI infection, sepsis, septicaemia or diarrhoea in a human subject.

[0271] In the composition for use in a method, or any method described herein, at least 1×10⁷ PFU of particles are administered to the subject. Also provided is a dose of a composition described herein, wherein the dose is a dose of at least 1×10⁷ PFU of said particles. For example, the dose is at least 1×10⁷, 1×10⁸, 1×10⁹, 1×10¹⁰ or 1×10¹¹ PFU of said particles. For example, the dose is 1×10⁷, 2×10⁹ or 2×10¹¹ PFU of said particles. For example, the dose is from 1×10⁷ to 2×10¹¹ PFU of said particles. For example, the dose is 1×10⁷ to 2×10¹¹ PFU of said particles per gram body weight of the subject. In the method, E coli may be reduced by at least a 3 or 4 log 10 CFU/g of body weight of the subject.

[0272] The dose may be comprised by a medical device or container, eg, for oral or intravenous administration. The device may be an IV device, syringe or comprise an injection needle. The device or container may be sterile.

[0273] Optionally, the particles are administered to the subject at an MOI (multiplicity of infection) of at least 0.01. For example, the MOI is at least 0.1 or 1.

[0274] Preferably, the E coli cells comprise at least one strain that is an antibiotic-resistant or MDR strain; and/or at least one B2-I strain. Optionally, the antibiotic is fluoroquinolone (optionally levofloxacin), carbapenem or vancomycin; and/or wherein the E coli cells comprise beta-lactamase (ESBL)-producing E coli.

[0275] In an embodiment,
[0276] (i) the composition comprises first and second types of particles according to A, B and C
   [0277] A: each particle of the first type comprises a LPS adhesion moiety and a LamB adhesion moiety;
   [0278] B: each particle of the first type comprises a LPS adhesion moiety and a Tsx adhesion moiety; or
   [0279] C: each particle of the second type comprises a Tsx adhesion moiety but is devoid of LamB and LPS adhesion moieties;
[0280] (ii) the POI comprises a guided nuclease for targeting the DNA of an E coli cell, wherein the nuclease is capable of being expressed in the cell for cutting the DNA of the cell, thereby modifying or killing the cell;
[0281] (iii) each particle comprises a phage capsid containing the nucleic acid; and
[0282] (iv) the particles of the composition target a plurality of different E coli genes, optionally selected from essential and virulence genes.

[0283] There is provided:—

[0284] A method of detecting the presence of E coli (optionally B2 phylogroup E coli cells) in a sample, the method comprising
[0285] (a) contacting the sample with a composition described herein (eg, according to Concept A, B or C); and
[0286] (b) detecting that E coli cells have been killed or the growth or proliferation thereof has been reduced.

[0287] A method of detecting the presence of E coli (optionally B2 phylogroup E coli cells) in a sample, the method comprising
[0288] (a) contacting the sample with a composition described herein (eg, according to Concept A, B or C); wherein particles of the composition comprise a nucleic acid comprising or encoding a detectable label, wherein the said particles contact the cells and introduce therein the nucleic acid, wherein optionally the label is expressed in the cells; and
[0289] (b) detecting that E coli cells comprising the label.

[0290] A method for modifying the genomes of E coli cells, the method comprising contacting the cells with a composition described herein (eg, according to Concept A, B or C), wherein nucleic acid encoding the POI is introduced into the cells thereby modifying the genomes of the cells.

[0291] Where the POI is a nuclease, the nuclease is expressed in the cells and cuts genomic DNA of the cells, thereby killing the cells or reducing growth or proliferation of the cells in the subject.

[0292] A method for treating or preventing an infection by E coli cells in a human or animal subject, the method comprising administering to the subject a composition described herein (eg, according to Concept A, B or C).

[0293] Optionally, the sample is a patient sample (eg, blood, urine, stool or saliva sample), wherein the subject is a transplant or cancer patient (optionally a haematological cancer patient), or wherein the patient is suffering from or at risk of a urinary tract infection (UTI); and optionally wherein the transplant is a solid organ or stem cell transplant (optionally a haematopoietic cell transplant).

[0294] A method herein, in an embodiment, may be carried out in vitro. A method herein, in an embodiment, may be carried out ex vivo.

[0295] Optionally, at least 1×10⁷ PFU of particles are contacted with the sample. Optionally the PFU of particles described above is contacted with the sample.

[0296] Optionally, the particles are contacted with the sample at an MOI (multiplicity of infection) of at least 0.01.

[0297] Optionally, each particle comprised by the composition comprises a T-even phage capsid; optionally a capsid of a T2 phage, T2-like phage, RB69 phage or a RB69-like phage. Each particle may comprise a capsid of a Tevenvirinae phage. Each particle may be a modified Tevenvirinae phage that comprises a genominc insertion of a nucleotide sequence encoding POI or said nuclease (and optionally a cognate crRNA when the nuclease is a Cas).

[0298] Each particle may be a phage or packaged phagemid. Preferably, the phage is a lytic phage. In another embodiment, the phage may be a non-lytic phage. In another embodiment, the phage may be a temperate phage.

[0299] Optionally the phage is a modified T2 phage, T2-like phage, RB69 phage or a RB69-like phage. Preferably the phage is a T2- or RB69-like phage. Preferably, each particle is a modified first phage, wherein the genome of the first phage is at least 95, 96, 97, 98 or 99% identical (by nucleotide sequence identity) to the genome of wild-type T2 or RB69. Preferably, said percentage is at least 95%. Preferably, percentage identity between phage genomes is determined by Mash analysis using a kmer size of 17 and 1000.

[0300] Optionally, the composition comprises at least 3 or 4 different types of transduction particles, wherein the types have different adhesion moieties for recognising and binding to a cognate moieties comprised by E coli cells.

[0301] Optionally the cells comprise B2 phylogroup E coli. The cells are preferably pathogenic cells. The cells are preferably pathogenic to the subject. The cells may mediate a disease or condition in the subject.

[0302] In an embodiment,
[0303] (i) the nuclease is a guided nuclease for targeting the DNA of an E coli cell, wherein the nuclease is capable of being expressed in the cell for cutting the DNA of the cell, thereby killing the cell;
[0304] (ii) each particle comprises a phage capsid containing the nucleic acid; and
[0305] (iii) the particles of the composition target a plurality of different E coli genes, optionally selected from essential and virulence genes; and
[0306] (iv) optionally the composition comprises
[0307] A: particles which comprise a LPS adhesion moiety and a LamB adhesion moiety (and is devoid of Tsx);
[0308] B: particles which comprise a LPS adhesion moiety and a Tsx adhesion moiety; or
[0309] C: particles which comprise a Tsx adhesion moiety but is devoid of LamB and LPS adhesion moieties.

[0310] The nuclease may be a Cas nuclease and the nucleic acid encodes at least one crRNA or guide RNA that is operable with the Cas for DNA targeting in E coli cells. Each crRNA or guide RNA may comprise a spacer sequence that is complementary to an E coli protospacer sequence; optionally a protospacer of a B2 phylogroup E coli cell or an E coli cell of a strain selected from the group ST131, ST1193, ST648, ST315, ST405, ST361, ST88 and ST453. Each protospacer sequence may be comprised by a gene selected from E coli genes fimH, bolA. rpoH. lptA and murA.

[0311] Optionally, the particles of the composition target at least one virulence gene and at least one essential gene. Optionally, the particles of the composition targets at least three genes selected from virulence and essential genes. Optionally, the particles of the composition target all of E coli genes fimH, bolA, rpoH, lptA and murA.

[0312] Expression of the POI or nuclease or crRNA may be under the control of a stress-phase active (SPA) promoter. Optionally, the promoter is an E coli bolA promoter or comprises SEQ ID NO: 13. Additionally or alternatively, expression of the POI or nuclease or crRNA may be under the control of an E. coli promoter PJ23100 (SEQ ID NO: 14), for example a promoter having a nucleotide sequence that is at least 80, 90, 95, 96, 97, 98 or 99% identical to SEQ ID NO: 14. For example, the promoter has the nucleotide sequence of SEQ ID NO: 16.

[0313] A spacer herein may be adjacent a direct repeat sequences in the nucleic acid comprised by the particles. For example, the repeat has the sequence of SEQ ID NO: 15 (or said sequence with up to 5, 4, 3, or 2 nucleotide changes compared with SEQ ID NO: 15).

[0314] In an embodiment, expression of the POI or nuclease or crRNA may be under the control of a first promoter and expression of the adhesion moiety/ies is under the control of a second promoter that is different from the first promoter.

[0315] An adhesion moiety herein is on the outer surface of the cognate particle. In an embodiment, the moiety is comprised by a tail fibre, spike or capsid of the particle, preferably a tail fibre.

[0316] There is provided the following Paragraphs.

### Paragraphs:

[0317] 1. A composition comprising a plurality of transduction particles for use in a method of treating or preventing an infection by E coli cells in a human or animal subject, wherein the method comprises administering the particles to the subject, wherein
   [0318] (a) each particle comprises a nucleic acid encoding a nuclease for targeting the genomes of E coli cells, wherein the said administered particles contact the cells and introduce therein the nucleic acid, wherein the nuclease is expressed in the cells and cuts genomic DNA of the cells, thereby killing the cells or reducing growth or proliferation of the cells in the subject;
   [0319] (b) the E coli cells are cells of E coli phylogroup B2; and
   [0320] (c) each particle comprises an adhesion moiety for recognising and binding to a cognate moiety selected from a LPS, LamB and Tsx displayed on the surface of the phylogroup B2 E coli cells.
[0321] 2. A method for treating or preventing an infection by E coli cells in a human or animal subject, the method comprising administering to the subject a plurality of transduction particles, wherein the method comprises administering the particles to the subject, wherein
   [0322] (a) each particle comprises a nucleic acid encoding a nuclease for targeting the genomes of E coli cells, wherein the said administered particles contact the cells and introduce therein the nucleic acid, wherein the nuclease is expressed in the cells and cuts genomic DNA of the cells, thereby killing the cells or reducing growth or proliferation of the cells in the subject;
   [0323] (b) the E coli cells are cells of E coli phylogroup B2; and
   [0324] (c) each particle comprises an adhesion moiety for recognising and binding to a cognate moiety selected from a LPS, LamB and Tsx displayed on the surface of the phylogroup B2 E coli cells.
[0325] 3. The composition or method of Paragraph 1 or 2 respectively, wherein the method is for treating or preventing infection of the subject by an E coli strain selected from the group ST131, ST1193, ST648, ST315, ST405, ST361, ST88 and ST453.
[0326] 4. The composition or method of any preceding Paragraph, wherein the method is for treating or preventing infection of the subject by a plurality of different phylogroup B2 strains of E coli; optionally wherein the plurality comprises E coli ST131 and ST1193 cells.
[0327] 5. The composition or method of any preceding Paragraph, wherein the subject is a transplant or cancer patient (optionally a haematological cancer patient), or wherein the patient is suffering from or at risk of a urinary tract infection (UTI); and optionally wherein the transplant is a solid organ or stem cell transplant (optionally a haematopoietic cell transplant) or wherein the transplant is a transplant of a medical device.
[0328] 6. The composition or method of any preceding Paragraph, wherein the method is carried out prior to the subject receiving a transplant.
[0329] 7. The composition or method of any preceding Paragraph, wherein the B2 E coli cells comprise a strain of E coli that causes sepsis, septicaemia or diarrhoea in humans.
[0330] 8. The composition or method of any preceding Paragraph for preventing haemolytic uremic syndrome (HUS), a UTI infection, sepsis, septicaemia or diarrhoea in the subject.
[0331] 9. The composition or method of any preceding Paragraph, wherein each particle comprises a phage capsid containing the nucleic acid; optionally wherein the capsid comprises capsid proteins of a T-even (optionally T4) or lambda phage.
[0332] 10. The composition or method of any preceding Paragraph, wherein each particle is a phage (optionally a lytic phage) or packaged phagemid.
[0333] 11. The composition or method of any preceding Paragraph, wherein at least 2, 3 or 4 different types of transduction particle are administered to the subject.
[0334] 12. The composition or method of any preceding Paragraph, wherein a first type of transduction particle and a second type of transduction particle are administered to the subject, wherein the first type of particle comprises a first adhesion moiety that is capable of recognising and binding to a first cognate moiety selected from the group LPS, LamB and Tsx displayed on B2 E coli, and the second type of particle comprises a second adhesion moiety that is capable of recognising and binding to a second cognate moiety selected from said group, wherein the first and second adhesion moieties different from each other.
[0335] 13. The composition or method of Paragraph 12, wherein the first and second cognate moieties are different from each other.
[0336] 14. The composition or method of any preceding Paragraph, wherein the nucleic acid of each particle comprises a nucleotide sequence (N1) encoding said nuclease, wherein each particle is a synthetic T-even phage (optionally a T4 phage) comprising an insertion of N1 into the genome of the phage, wherein the region is between the pin (protease inhibitor) gene and the iPII (internal protein) gene.
[0337] 15. The composition or method of any preceding Paragraph, wherein said nuclease is a guided nuclease, optionally a Cas, meganuclease, zinc finger nuclease or TALEN.
[0338] 16. The composition or method of any preceding Paragraph, wherein the nuclease is a Type I, II, III, IV, V or VI nuclease, optionally a Cas9 or a Cas3.
[0339] 17. The composition or method of any preceding Paragraph, wherein at least 1×10⁷ PFU of particles are administered to the subject.
[0340] 18. The composition or method of any preceding Paragraph, wherein the particles are administered to the subject at an MOI (multiplicity of infection) of at least 0.01.
[0341] 19. The composition or method of any preceding Paragraph, wherein the strain or at least one strain is an antibiotic-resistant or MDR strain; and/or wherein the strain or at least one strain is a B2-I strain.
[0342] 20. The composition or method of Paragraph 19, wherein the antibiotic is fluoroquinolone (optionally levofloxacin), carbapenem or vancomycin; and/or wherein the E coli are beta-lactamase (ESBL)-producing E coli.
[0343] 21. The composition or method of any preceding Paragraph, wherein
   [0344] (i) the nuclease is a Cas,
   [0345] (ii) each particle comprises a phage capsid containing the nucleic acid; and
   [0346] (iii) wherein a first type of transduction particle and a second type of transduction particle are administered to the subject, wherein the first type of particle comprises a first adhesion moiety that is capable of recognising and binding to a first cognate moiety selected from the group LPS, LamB and Tsx displayed on B2 strain E coli, and the second type of particle comprises a second adhesion moiety that is capable of recognising and binding to a second cognate moiety selected from said group, wherein the first and second adhesion moieties different from each other.
[0347] 22. A method for treating or preventing an infection by E coli cells in a human or animal subject, the method comprising administering to the subject a plurality of transduction particles, wherein
   [0348] (a) each particle comprises a nucleic acid encoding a crRNA or guide RNA that is operable with a Cas nuclease for chromosomal targeting in the cells, wherein the said administered particles contact the cells and introduce therein the nucleic acid, wherein the crRNA or guide RNA is expressed and guides the Cas nuclease wherein the nuclease cuts the chromosomes of the cells, thereby killing the cells or reducing growth or proliferation of the cells in the subject;
   [0349] (b) the E coli cells are cells of E coli phylogroup B2; and
   [0350] (c) each particle comprises an adhesion moiety for recognising and binding to a cognate moiety selected from a LPS, LamB and Tsx displayed on the surface of the phylogroup B2 E coli cells.
[0351] 23. The method of Paragraph 22, wherein the method is according to any one of Paragraphs 1-20, optionally except that the nuclease is an endogenous nuclease of the cells and is not encoded by the nucleic acid comprised by the particles.
[0352] 24. A composition comprising a plurality of transduction particles for use in a method of treating or preventing an infection by E coli cells in a human or animal subject according to Paragraph 22 or 23, wherein
   [0353] (a) each particle comprises a nucleic acid encoding a crRNA or guide RNA that is operable with a Cas nuclease for chromosomal targeting in the cells, wherein the said administered particles contact the cells and introduce therein the nucleic acid, wherein the crRNA or guide RNA is expressed and guides the Cas nuclease wherein the nuclease cuts the chromosomes of the cells, thereby killing the cells or reducing growth or proliferation of the cells in the subject;
   [0354] (b) the E coli cells are cells of E coli phylogroup B2; and
   [0355] (c) each particle comprises an adhesion moiety for recognising and binding to a cognate moiety selected from a LPS, LamB and Tsx displayed on the surface of the phylogroup B2 E coli cells.
[0356] 25. The composition or method of any preceding Paragraph for preventing the translocation of B2 phylogroup E coli from the gastrointestinal or urinary tract to the blood stream of the subject, thereby preventing or reducing bacteriaemia in the patient.
[0357] 26. A method of detecting the presence of a B2 phylogroup E coli in a sample, the method comprising contacting the sample comprising B2 phylogroup E coli with a composition comprising a plurality of transduction particles, wherein
   [0358] (a) each particle comprises a nucleic acid encoding a nuclease for targeting the genomes of said E coli cells, wherein the said administered particles contact the cells and introduce therein the nucleic acid, wherein the nuclease is expressed in the cells and cuts genomic DNA of the cells, thereby killing the cells or reducing growth or proliferation of the cells in the subject;
   [0359] (b) each particle comprises an adhesion moiety for recognising and binding to a cognate moiety selected from a LPS, LamB and Tsx displayed on the surface of the phylogroup B2 E coli cells; and
   [0360] (c) the method comprises detecting that B2 phylogroup E coli cells have been killed or the growth or proliferation thereof has been reduced.
[0361] 27. A method of detecting the presence of a B2 phylogroup E coli in a sample, the method comprising contacting the sample comprising B2 phylogroup E coli with a composition comprising a plurality of transduction particles, wherein
   [0362] (a) each particle comprises a nucleic acid comprising or encoding a detectable label, wherein the said administered particles contact the cells and introduce therein the nucleic acid, wherein optionally the label is expressed in the cells;
   [0363] (b) each particle comprises an adhesion moiety for recognising and binding to a cognate moiety selected from a LPS, LamB and Tsx displayed on the surface of the phylogroup B2 E coli cells; and
   [0364] (c) the method comprises detecting B2 phylogroup E coli cells comprising the label.
[0365] 28. The method of Paragraph 26 or 27, wherein the composition comprises the features of the composition of any one of Paragraphs 1, 2-21 24 and 25.
[0366] 29. The method of any one of Paragraphs 26-28, wherein the E coli comprise one or more E coli strains selected from the group ST131, ST1193, ST648, ST315, ST405, ST361, ST88 and ST453.
[0367] 30. The method of any one of Paragraphs 26-29, wherein the sample is a patient sample (eg, blood, urine, stool or saliva sample), wherein the subject is a transplant or cancer patient (optionally a haematological cancer patient), or wherein the patient is suffering from or at risk of a urinary tract infection (UTI); and optionally wherein the transplant is a solid organ or stem cell transplant (optionally a haematopoietic cell transplant).
[0368] 31. The method of any one of Paragraphs 26-30, wherein the nucleic acid of each particle comprises a nucleotide sequence (N1) encoding said nuclease, or comprising or encoding the label wherein each particle is a synthetic T-even phage (optionally a T4 phage) comprising an insertion of N1 into the genome of the phage, wherein the region is between the pin (protease inhibitor) gene and the iPII (internal protein) gene.
[0369] 32. The method of any one of Paragraphs 26-31, wherein at least 1×10⁷ PFU of particles are contacted with the sample.
[0370] 33. The method of any one of Paragraphs 26-32, wherein the particles are contacted with the sample at an MOI (multiplicity of infection) of at least 0.01.

[0371] It will be understood that particular embodiments described herein are shown by way of illustration and not as limitations of the invention. The principal features of this invention can be employed in various embodiments without departing from the scope of the invention. Those skilled in the art will recognize, or be able to ascertain using no more than routine study, numerous equivalents to the specific procedures described herein. Such equivalents are considered to be within the scope of this invention and are covered by the claims. All publications and patent applications mentioned in the specification are indicative of the level of skill of those skilled in the art to which this invention pertains. All publications and patent applications and all US equivalent patent applications and patents are herein incorporated by reference to the same extent as if each individual publication or patent application was specifically and individually indicated to be incorporated by reference. Reference is made to the publications mentioned herein and equivalent publications by the US Patent and Trademark Office (USPTO) or WIPO, the disclosures of which are incorporated herein by reference for providing disclosure that may be used in the present invention and/or to provide one or more features (eg, of a vector) that may be included in one or more claims herein.

[0372] The use of the word “a” or “an” when used in conjunction with the term “comprising” in the claims and/or the specification may mean “one,” but it is also consistent with the meaning of “one or more,” “at least one,” and “one or more than one.” The use of the term “or” in the claims is used to mean “and/or” unless explicitly indicated to refer to alternatives only or the alternatives are mutually exclusive, although the disclosure supports a definition that refers to only alternatives and “and/or.” Throughout this application, the term “about” is used to indicate that a value includes the inherent variation of error for the device, the method being employed to determine the value, or the variation that exists among the study subjects.

[0373] As used in this specification and claim(s), the words “comprising” (and any form of comprising, such as “comprise” and “comprises”), “having” (and any form of having, such as “have” and “has”), “including” (and any form of including, such as “includes” and “include”) or “containing” (and any form of containing, such as “contains” and “contain”) are inclusive or open-ended and do not exclude additional, unrecited elements or method steps.

[0374] The term “or combinations thereof” or similar as used herein refers to all permutations and combinations of the listed items preceding the term. For example, “A, B, C, or combinations thereof is intended to include at least one of: A, B, C, AB, AC, BC, or ABC, and if order is important in a particular context, also BA, CA, CB, CBA, BCA, ACB, BAC, or CAB. Continuing with this example, expressly included are combinations that contain repeats of one or more item or term, such as BB, AAA, MB, BBC, AAABCCCC, CBBAAA, CABABB, and so forth. The skilled artisan will understand that typically there is no limit on the number of items or terms in any combination, unless otherwise apparent from the context.

[0375] Any part of this disclosure may be read in combination with any other part of the disclosure, unless otherwise apparent from the context.

[0376] All of the compositions and/or methods disclosed and claimed herein can be made and executed without undue experimentation in light of the present disclosure. While the compositions and methods of this invention have been described in terms of preferred embodiments, it will be apparent to those of skill in the art that variations may be applied to the compositions and/or methods and in the steps or in the sequence of steps of the method described herein without departing from the concept, spirit and scope of the invention. All such similar substitutes and modifications apparent to those skilled in the art are deemed to be within the spirit, scope and concept of the invention as defined by the appended claims.

[0377] The present invention is described in more detail in the following non-limiting Examples.

### EXAMPLES

### Example 1: Particle Composition for Surprisingly Targeting a Plurality of Different E coli Strains, Including B2 Phylogroup

### Overview

[0378] Patient samples containing various different E coli strains were challenged with a particle composition. The composition comprised a plurality of transduction particles bearing adhesion moieties that are able to bind to LPS, LamB or Tsx present on E coli cells. The particles comprised capsids comprising phage capsid proteins, with the capsids containing nucleic acids encoding CRISPR/Cas systems for chromosomal targeting in E coli. Each nucleic acid encoded a plurality of different cRNAs comprising spacer sequences that target E coli chromosomal genes. The ability to kill or reduce growth of E coli in the samples was determined using a plaque assay as described below. Whole genome sequencing and genome assembly were used to assign susceptible E coli strains to phylogroups. It was surprisingly seen that use of such a particle composition was able to very effectively and extensively target a plurality of different E coli strains (these strains being clinically relevant from actual patient samples). Furthermore, advantageously a large number of different strains of the B2 phylogroup were targeted and killed. This is significant, because B2 E coli strains often display antibiotic resistance (such as MDR), eg, resistance to fluoroquinolone, that causes potentially life-threating infections in patients, such as in cancer, transplant and UTI patients. In addition to the B2 group, we surprisingly also were able to successfully kill or inhibit the growth of multiple strains of E coli phylo groups B1, D, F and G.

### Patient Sampling

[0379] The samples tested (n=71) were obtained from two prospective observational studies enrolling adult (≥18 years) patients who were admitted to hospital for an autologous or allogenic hematopoietic cell transplantation (HCT) and who received levofloxacin (a fluoroquinolone, FQ) prophylaxis starting the day before the transplantation (Day −1) (Satlin 2021 and Satlin 2018). Trimethoprim-sulfamethoxazole (TMP-SMX) was administered to allogenic HCT recipients from 2 to 4 days prior to the HCT. The antibiotic treatments do not eradicate all E coli in the patients; for example, fluoroquinolone-resistant E coli would persist and thus sampling obtained E coli from patients. E coli isolates were derived from either anal swabs or fecal samples obtained upon admission for transplantation. The timing of sampling varied from Day −7 (7 days before transplantation) to Day 0 (the day of transplantation).

### General Plaque Assay: Spotting for Coverage

[0380] This procedure describes the method to assess the coverage of phage particle lysates on a panel of bacterial strains.

| Section | Procedure | |
|---|---|---|
| Step 1 | Prepare bacterial indicator strains by inoculating 5 μl of a frozen stock into 250 μl of LB | |
| | broth on a 96 well plate. Incubate overnight at 37° C. and 250 rpm. This step is done the | |
| | day before the assay is performed. | |
| Step 2 | Pre-acclimatize the LB plates to room temperature. | |
| | Melt and acclimatize the top agar to 55° C. and add CaCl₂ and MgSO₄ to a final | |
| | concentration of 5 mM. | |
| Step 3 | In a culture tube mix 100 ml of the overnight indicator strain with 3 ml of pre-warmed | |
| | top agar. When working with many strains, the top agar can be distributed to culture | |
| | tubes and kept at 60° C. before use. | |
| Step 4 | Pour the mixture on top of the room temperature LB plate and distribute evenly by | |
| | swirling. | |
| | Let plates solidify in a biosafety cabinet or lab bench for 5-10 minutes. Keep the lids | |
| | closed. While solidifying avoid stacking plates to keep the layer of the top agar even | |
| | across the plate surface | |
| Step 5 | In the meantime, dilute the sample(s) or the stock of phage to the required dilutions | |
| | (10-fold dilutions). Use PBS for dilutions. | |
| Step 6 | Spot dilutions 0 to −9, 5 μl of each on top of your overlays and let them dry for 20 | |
| | minutes (or until the spots are completely absorbed by the agar) on a bench with the | |
| | lids open. Incubate plates upside down at 37° C. overnight. | |
| Step 7 | Evaluation of the results: | |
| | 1. | If visible plaques appear, they are counted, and phage concentration is |
| | | calculated. The result is recorded as YES. |
| | Calculation of phage concentration: number of plaques × 200 (to make it into ml) × | |
| | dilution where you counted. i.e: If counted 5 plaques on dilution - 6: 5 × 200 × 1e6 = | |
| | 1e9 pfu/ml | |
| | 2. | If there are no visible plaques, but inhibition of growth is observed the result is |
| | | recorded as LZ (lysis zone) and the lowest dilution of inhibition is noted. |
| | 3. | If no plaques or inhibition is observed, the result is recorded as NO |

[0381] Spotting was performed according to the above general plaque assay. Bacterial strains were prepared by inoculating 5 μl of a frozen stock into 250 μl of LB broth in a 96 well plate. The plate was incubated at 37° C. and 250 rpm overnight. Next day, in a culture tube 100 ml of the overnight strain was mixed with 3 ml of pre-warmed top agar (at 55° C.) containing 5 mM CaCl₂) and 5 mM MgSO₄. The mixture was poured on top of pre-acclimatized LB plate and distributed evenly by swirling. The plates were left on the lab bench for 5-10 minutes to solidify. In the meantime, the particle composition was diluted in PBS buffer from 100 to 10-9 and 5 μL of each serial dilution were spotted on top of the overlays. Plates were left on the bench with the lid open for 20 minutes or until the spots are completely absorbed by the agar, and then incubated upside down at 37° C. overnight.

### Evaluation of the Results

[0382] If visible plaques appeared, the results were recorded as positive, plaques were counted, and phage concentration was calculated. Calculation of phage concentration: number of plaques×200×dilution where plaques were observed. i.e: If counted 5 plaques on dilution—6:5×200×1e6=1e9 pfu/ml

[0383] If there were no visible plaques, but inhibition of growth was observed, the result was recorded as lysis zone and the lowest dilution of inhibition is noted.

[0384] If no plaques or inhibition was observed, the results were recorded as negative.

### Whole Genome Sequencing

[0385] DNA extraction was performed using Omega Bio-tek, Mag-Bind Bacterial DNA 96 Kit. The protocol was followed, and samples were eluted in 100 μL Elution Buffer.

[0386] Sequencing libraries were generated using Illumina Nextera XT, and sequencing was performed with paired ends on an Illumina MiSeq instrument with a V2 flow cell (300 cycles). The average sequencing depth for all samples was 48× (range: 31-72×)

### Genome Assembly and Phylogenetic Tree Reconstruction

[0387] Raw data was trimmed for adaptor sequences and low-quality bases using fastp 0.22.0 (Chen et al 2018). Genomes were assembled using SKESA 2.4.0 (Souvorov et al 2018). The phylogroup of each sample was determined using EzClermont 0.7.0 (https://github.com/nickp60/EzClermont). Genomic distances were estimated using Mash 1.1 (Ondov et al 2016) with a kmer size of 17 and 1000 sketches. A neighbour joining tree was constructed using rapidnj 2.3.2 (Simonsen et al 2008). The final tree visualization was generated in Interactive Tree Of Life (iTOL) version 6.5.3 (Letunic et al 2021). Strain phylotyping was carried out in silico using the method disclosed in Microb Genom. 2018 July; 4 (7): e000192, Published online 2018 Jun. 19. doi: 10.1099/mgen.0.000192, PMCID: PMC6113867, PMID: 29916797, “ClermonTyping: an easy-to-use and accurate in silico method for Escherichia genus strain phylotyping, Johann Beghain et al. The set of primer sequences described in Table S1 of that reference (available in the online version of this article) was used.

### Results

[0388] It was surprisingly seen that use of such a particle composition was able to very effectively and extensively target a plurality of different E coli strains (these strains being clinically relevant from actual patient samples), see FIG. 1. Furthermore (see FIG. 2), advantageously a large number of different strains of the B2 phylogroup were targeted and killed. This is significant, because B2 E coli strains often display antibiotic resistance (such as MDR), eg, resistance to fluoroquinolone, that causes potentially life-threating infections in patients, such as in cancer, transplant and UTI patients. More than 10 different ST131 strains were killed (plaques formed) and more than 10 different ST1193 strains were killed (plaques formed). Sequence type 1193 has recently emerged as a new, virulent and resistant lineage among fluoroquinolone resistant E coli. Escherichia coli ST131 is a globally dominant multidrug resistant clone associated with high rates of rUTI. Uropathogenic E coli (UPEC) are the primary cause of urinary tract infection (UTI), being responsible of ˜90% of all cases. UPEC strains largely belong to the E coli phylogenetic groups B2 or D and are often clonal, with the most common sequence types (STs) isolated worldwide being ST69, ST73, ST95 and ST1312. The recently emerged and globally disseminated ST131 clone is a major contributor to hospital- and community-acquired UTI, as well as bloodstream infections and infections in companion animals and poultry. Originally identified in 2008, ST131 is associated with the worldwide spread of the CTX-M-15 extended spectrum β-lactamase (ESBL) resistance gene. Most ST131 strains are now strongly associated with multidrug resistance (MDR), including resistance to fluoroquinolones. Recent reports have also identified strains that are resistant to last-line carbapenems.

[0389] Significantly, we included clinical samples from patients that went on to develop E coli bacteraemia (despite pre-treatment with FQ/TMP-SMX). The composition could kill or reduce growth of E coli strains in these samples (and this is indicative of the possibility of using the composition for prophylaxis of bacteraemia in subjects). This included strains of the following Multi-Locus Sequence Typing (MLST) types (see FIG. 2): ST648, ST315, ST405, ST361, ST88, ST453, ST1193 and ST131.

[0390] In addition to the B2 group, we surprisingly also were able to successfully kill or inhibit the growth of multiple strains of E coli phylo groups B1, D, F and G.

### REFERENCES

[0391] Shifu Chen, Yanqing Zhou, Yaru Chen, Jia Gu; fastp: an ultra-fast all-in-one FASTQ preprocessor, Bioinformatics, Volume 34, Issue 17, 1 Sep. 2018, Pages i884-i890, https://doi.org/10.1093/bioinformatics/bty560
[0392] Alexandre Souvorov, Richa Agarwala and David J. Lipman. SKESA: strategic k-mer extension for scrupulous assemblies. Genome Biology 2018 19:153. doi.org/10.1186/s13059.018-1540-z
[0393] Ondov, B. D., Treangen, T. J., Melsted, P. et al. Mash: fast genome and metagenome distance estimation using MinHash. Genome Biol 17, 132 (2016). https://doi.org/10.1186/s13059.016-0997-x
[0394] Martin Simonsen, Thomas Mailund and Christian N. S. Pedersen. Rapid Neighbour Joining. Proceedings of the 8th Workshop in Algorithms in Bioinformatics (WABI), LNBI 5251, 113-122, Springer Verlag, October 2008. doi: 10.1007/978-3-540-87361-7_10.
[0395] Letunic I and Bork P (2021) Nucleic Acids Res doi: 10.1093/nar/gkab301 Interactive Tree Of Life (iTOL) v5: an online tool for phylogenetic tree display and annotation.
[0396] Michael J. Satlin et al, Colonization with Fluoroquinolone-resistant Enterobacterales decreases the effectiveness of fluoroquinolone prophylaxis in hematopoietic cell transplant recipients. Clinical Infectious Diseases 2021.
[0397] Michael J. Satlin et al, Colonization with Levofloxacin-resistant extended-spectrum β-lactamase-producing Enterobacteriaceae and risk of bacteremia in hematopoietic cell transplant recipients. Clinical Infectious Diseases 2018.

### Example 2: Phage-Derived CRISPR Therapeutic Designed to Reduce E. coli in Hematological Cancer Patients

### Abstract

[0398] Patients with hematological malignancies frequently develop bloodstream infections due to translocation of E. coli and other bacteria from the gut. Antibiotic treatment to prevent these infections has detrimental effects on the microbiome and immune tonus and is further hampered by increasing antibiotic resistance, in particular towards fluroquinolones. We screened a library of 162 wild-type (WT) phages identifying 8 phages with broad coverage of E. coli. Selected phages were engineered with novel tail fibers and a CRISPR-Cas machinery targeting clinically relevant E. coli. Engineered phages target bacteria in biofilms, reduce the emergence of phage-tolerant E. coli and out-compete their ancestral WT phages in co-culture experiments. SNIPR001 comprises four engineered bacteriophages with broad host-range across the E. coli phylogeny, including multi-drug resistant strains. SNIPR001 is well-tolerated in animals and reduces E. coli load in the murine gut better than its constituent components. SNIPR001 represents a novel CRISPR-Cas-therapeutic designed to selectively target E. coli which may cause fatal infections in hematological cancer patients.

### Introduction

[0399] Cancer treatment continues to advance and survival rates for people with hematological malignancies are increasing¹. However, the chemotherapeutic regimens that are frequently used in this immunocompromised population cause bone marrow suppression and gastrointestinal mucositis with associated increased intestinal permeability²⁻⁴. Translocation of gut bacteria, including E. coli, from the gastrointestinal tract is a frequent cause of bloodstream infections⁵.

[0400] The mortality related to bloodstream infections caused by enteric bacteria such as E. coli is 15-20% 6; thus, antimicrobial prophylaxis is applied in people at risk of febrile neutropenia⁷. There are no approved therapies for the prevention of bloodstream infections in patients with hematological cancers, yet fluoroquinolones are used off-label in the United States based on two randomized trials that demonstrated that they decrease bacterial infections during neutropenia^{7,8,9}. Beyond the side effects of fluoroquinolones, including safety warnings and precautions, bacterial resistance is rising in oncology patients and approaching 60% in E. coli bloodstream infections in the USA¹⁰. In immunocompromised patients with hematological malignancies who develop chemotherapy-induced neutropenia, E. coli is responsible for 25.1-30% of all bacteremia cases^{11,12}. Moreover, up to 65% of E. coli isolated as the causative pathogen from bloodstream infections⁵ in patients with hematological cancers undergoing hematopoietic stem cell transplantation were resistant to fluoroquinolones¹³. Accordingly, novel narrow-spectrum prophylactic options that would also cover fluroquinolone resistant E. coli are needed to prevent infections in these vulnerable patients.

[0401] Bacteriophage therapy has been used prior to the broad availability of antibiotics¹⁴, but has now re-gained interest¹⁵ due to the rise in bacterial antimicrobial resistance combined with several successful individual case reports¹⁶⁻¹⁸. Still, few clinical trials with wild-type (WT) phages have been conducted¹⁹⁻²² and, although several have been directed towards E. coli, these have failed to produce convincing results in larger randomized controlled trials likely due to incomplete coverage of the target strains by the phage cocktail²³. Recent efforts have involved more extensive characterization of phages (n=41) targeting Klebsiella pneumoniae strains (n=17)²⁴ and phages (n=248) targeting Vibrio strains (n=294)²⁵ suggesting that better coverage of target strains can be achieved with large scale systematic screening. Synthetic biology has also been used to engineer T3 phage tailfibers augmenting the spectrum of strains targeted by the engineered phage²⁶. Finally, clustered regularly interspaced short palindromic repeats (CRISPR)-Cas systems can contribute to efficacy as a complementary killing modality to the lytic activity of the phage. CRISPR-associated nucleases (Cas) and a CRISPR-RNA form a complex, which, in some CRISPR-Cas systems, can bind to a homologous DNA target sequence and result in DNA degradation^{27,28}. Since prokaryotes lack error-prone non-homologous end-joining and rely solely on homologous recombination to repair DNA damage, they are prone to cell death following DNA degradation. This vulnerability has been exploited by using CRISPR-Cas as an antimicrobial modality for several bacteria, including Staphylococcus aureus, E. coli or Clostridium difficile²⁹⁻³⁵.

[0402] To address the significant unmet medical need for new prophylactic agents for patients with hematological malignancies we report on the development of SNIPR001. Our research process for designing SNIPR001 includes several steps (FIG. 3). In short, a library (n=162) of WT phages were tested in vitro on a panel of phylogenetically diverse E. coli strains representing the biology of the target bacterium E. coli. WT phages with the broadest and most complementary target strain coverage were selected for further engineering. Selected WT phages were subjected to both tail fiber engineering and CRISPR-Cas-arming to create a library of CRISPR-Cas-Armed Phages (CAPs). The CAP library was assessed for manufacturability, in vitro stability, spectrum of efficacy, in vivo pharmacokinetics, and efficacy. A combination of four CAPs was selected to create the development candidate SNIPR001, which has now entered clinical development (ClinicalTrials.gov ID NCT05277350).

### Results

[0403] Wild-type lytic phages α15, α17, α20, α48 and α51 (all members of Tevenvirinae) were the starting point for phage engineering to produce synthetic phage types (CRISPR-armed phage; CAPs) α15.2, α20.4, α48.4 or α51.5. Tail fibre specificities for cognate E coli surface ligands TSX, LPS and LamB were as follows:—
[0404] α15.2 binds LPS and Tsx
[0405] α20.4 binds LPS and LamB
[0406] α48.4 binds Tsx
[0407] α51.5 binds Tsx

[0408] A cocktail comprising these phage types targeting LPS, LamB and Tsx was made (herein the cocktail termed SNR001).

CRISPR-Cas-Arming of Phages to Target E. coli

[0409] To CRISPR-Cas-arm the selected lytic phages and generate a library of CAPs, the type I-E CRISPR-Cas system of E. coli³⁹ was engineered to target phylogenetically diverse E. coli strains. A CRISPR-Guided Vector (CGV™) was generated, containing the cas3 gene (ygcB) and a downstream cascade gene complex composed of casA (ygcL, cas8e), casB (ygcK, cas11), casC (ygcJ, cas7), casD (ygcI, cas5), and casE (ygcH, cas6), and a CRISPR array targeting a plurality of different genes of the E. coli genome (CGV-EcCas). To evaluate the killing efficiency of the CRISPR-Cas system, the CGV-EcCas was conjugated to E. coli strain b52, showing an average reduction of 3.5 log 10 CFU/mL, compared to the empty vector. As expected, no effect was observed after conjugating the CGV-EcCas to a non-target E. coli strain. The killing efficiency of CGV-EcCas was further assessed on an abbreviated panel of 82 E. coli strains. Conjugative delivery of the empty vector was accomplished in 75% of the isolates. For all strains where the CGV-EcCas was delivered, bacterial counts were reduced below the limit of detection (LOD, 200 CFU/mL) corresponding to a reduction of 1-6 log₁₀, highlighting the potent CRISPR-Cas-mediated killing (FIG. 3A).

[0410] In addition to promoter P_{bolA}, the CRISPR-Cas systems was engineered to express from a synthetic constitutively expressed E. coli promoter (P_{J23100}). CRISPR arrays were designed to target multiple virulence (spacer 1, 2 and 3) or essential genes (spacer 4 and 5) (SEQ ID NOs: 6-10), as targeting multiple regions has been shown to prevent resistance evolution⁴³. To confirm the CRISPR-Cas activity in the CAPs, we measured the cas3 transcripts in samples obtained at 5-, 15- and 30-min following a synchronized infection with the equal MoI of CAP α15.2 in comparison to WT α15 using RT-qPCR and observed increasing levels of cas3 RNA only upon CAP α15.2 infection. Next, we extended this assay to all four CAPs (α15.2, α20.4, α48.4, α51.5) and demonstrated increasing levels of cas3 transcripts highlighting that the CAPs expressed the CRISPR-Cas system during infection of a target strain.

[0411] To demonstrate the competitive superiority of the CAPs, we performed competition experiments in which CAPs (α20.4 and α15.2) and their WT ancestral phages were co-cultured with E. coli strain b230, serving as target for both competing phages. Approximate initial ratios of 1 CAP to 9 WT phages were co-cultured and passaged four times on fresh target cells in liquid cultures. After each passage, the relative abundance of CAP and WT phage particles was evaluated. Both CAPs outcompeted their WTs within four rounds; CAP α20.4 reached 68% after four rounds, and CAP α15.2 reached 86% after two rounds (FIG. 3B-C), demonstrating an improved fitness compared to the WT phages.

### CAP Cocktail SNIPR001

[0412] The activity of CAPs was tested against the E. coli panel (n=429) using the growth kinetics assay. To maximize our coverage, we combined CAPs, resulting in a composition (SNR001) comprising phage types α15.2, α20.4, α48.4, and α51.5.

[0413] The ancestors of CAPs α15.2, α20.4, α48.4, and α51.5 are classified under the Tevenvirinae subfamily. Specifically, ancestors α15, α48, α20 and α51 have sequence similarity to E. coli phage T2, T4 and RB69 phages as shown below (as determined by Mash analysis). In silico analyses of the genomes of SNIPR001 showed that the CAPs encode no known transposase or integrase genes, indicating that the phages are not temperate, and thus not predicted to be capable of inserting their DNA in bacterial cells.

Similarity Matrix:

| | T2 | T4 | RB69 |
|---|---|---|---|
| a15 | 96.56% | 96.41% | 82.60% |
| a20 | 82.60% | 83.20% | 96.70% |
| a48 | 96.74% | 96.57% | 81.82% |
| a51 | 96.23% | 96.13% | 81.86% |

[0414] This similarity was calculated wherein the distance between genomes was calculated using Mash (v 1.1) with a k-mer size of 21 and a sketch size of 10 000.

[0415] See Ondov, B. D., Treangen, T. J., Melsted, P. et al., “Mash: fast genome and metagenome distance estimation using MinHash”, Genome Biol 17, 132 (2016). https://doi.org/10.1186/s13059.016-0997-x for further discussion of Mash

SNIPR001 does not Affect Other Gut Associated Bacteria

[0416] Ideally, a phage-based therapy should not disturb the non-targeted genera of the microbiome, thus the specificity of SNIPR001 towards E. coli was assessed by investigating its effects on a panel of strain which includes non-E. coli species which are E. coli relatives, as well as a range of families associated with the commensal bacterial community in the gut bacteria (and E. coli as a positive control). The bacteria were cultured without CAPs, with the SNIPR001 cocktail, or with individual SNIPR001 CAPs (n=4). The growth in CFU/mL was evaluated over a 4-hour period (DCFU/mL_{4 h-0 h}). In parallel, E. coli b2480 was grown under the same conditions as a positive control (FIG. 4). We observed no significant effect (p>0.05, Student's t-test, FDR-corrected with Holm's method) of the SNIPR001 cocktail or any of the SNIPR001 CAPs on non-E. coli strains, while the growth of E. coli was significantly inhibited (p<0.05, Student's t-test, FDR-corrected with Holm's method). Thus, SNIPR001 is not expected to impact the gut microbiome beyond the target E. coli.

### In Vitro Host-Range of SNIPR001 in Clinical Target Population

[0417] To understand the potential effect in strains relevant to hematological cancer patients the coverage of SNIPR001 was tested against our internal E. coli panel (429 strains) and a set of 382 clinical E. coli strains (JMI Laboratories, North Liberty, IA, USA). These JMI strains originated from patients with bloodstream infections hospitalized in hemato-oncology units across four different regions from 2018-2020 (Asia-Pacific 54 isolates, Europe 161 isolates, Latin America 26 isolates, and North America 141 isolates). The genotypic distribution of E. coli strains in the patient population was determined using whole genome sequencing and was found to be diverse, representing nine phylogroups and 118 multi-locus sequence types (MLSTs) (FIG. 5A). Using a spotting assay, we recorded phage infectivity against the panel of JMI strains. Visible single plaques were differentiated from lysis zones in cases where single plaques could not be verified. All spotting assays were run in duplicates. We observed overall coverages of 90.4±1.6% of SNIPR001 in the 382 JMI E. coli panel, and of 95.6±0.3% of SNIPR001 on the internal E. coli panel (429 strains). Furthermore, we observed plaques in 53.1±7.7% and lysis zones in 37.3±6.1% of the JMI panel strains, and similarly plaques in 60.5±6.6% and lysis zones in 35.1±6.3% of the internal panel strains (FIG. 5B). SNIPR001 showed 100% coverage in the B2 phylogroup, representing 53% of the JMI panel. This phylogroup is correlated with multi-drug resistance and virulence. Additionally, we observed that SNIPR001 covered 91.7% (n=55) of strains classified as multi-drug resistant, 100% (n=5) of carbapenem-resistant strains, 92.2% (n=95) of extended-spectrum β-lactamases producing strains, and 88.9% (n=176) of strains that are resistant to fluroquinolones, such as ciprofloxacin and levofloxacin (FIG. 5C).

[0418] Finally, we validated SNIPR001 on a clinical panel (n=72) of fluroquinolones-resistant E. coli strains that were isolated from either a fecal sample or a perianal swab from hematological cancer patients. This population represents the expected clinical target patient population being pursued (SNIPR001 has been designated fast-track status by the FDA). A subset of these strains gave rise to a bloodstream infection (FIG. 5D). 82% of the E. coli strains (n=72) were susceptible to at least two or more of the CAPs in SNIPR001, and 93% of the strains were susceptible to the whole SNIPR001 cocktail (FIG. 5E). This data demonstrates the benefit of SNIPR001 compared to the individual CAPs with regards to improving the spectrum of efficacy.

### Tolerability and Gastrointestinal Recovery of SNIPR001 in Minipigs

[0419] The tolerability and gastrointestinal recovery of SNIPR001 were evaluated in Göttingen minipigs. Blood and feces were sampled over 7 days following oral administration of 2×10¹² PFU of SNIPR001 or vehicle. No CAPs were recovered from plasma, indicating no systemic exposure, while CAPs were recovered in the feces up to 7 days after SNIPR001 administration with a peak of 2×10⁷ PFU 24 h post-dosing (FIG. 6A). The minipigs exhibited no clinical signs and no significant changes were observed in hematology or biochemistry parameters, in particular, no changes were seen in any immune cells, compared to vehicle treatment, supporting that SNIPR001 was well tolerated. Similar recoveries were obtained with the individual CAPs (FIG. 6B). In conclusion, SNIPR001 appears to be well tolerated in Göttingen minipigs with gastrointestinal recovery.

### Efficacy of SNIPR001 and Constituent CAPs in a Mouse Colonization Model

[0420] To assess the in vivo efficacy of the four selected CAPs in reducing E. coli, we adapted a mouse gut colonization model from Galtier et al.⁴⁴ for E. coli strain b17. Streptomycin was administered for 3 days to reduce Gram-negative bacteria from the mouse gastrointestinal tract, after which streptomycin administration was stopped and animals were inoculated once perorally with E. coli b17 (1×10⁷ CFU). This allowed stable colonization for 3 to 4 days. Aiming at assessing the efficacy of CAPs on an established colonization, treatment was started 2 days after inoculation and the study was terminated on day 4 after inoculation, as the colonization starts to drop. To ensure maximum exposure of CAPs, mice were treated with 3 daily doses, administered 8 h apart, for a total of 6 doses over 2 days.

[0421] Mice were treated by oral gavage with a high, medium, or low dose (2×10¹¹ PFU, 2×10⁹ PFU, 1×10⁷ PFU, respectively) of SNIPR001, vehicle (negative control), or gentamicin (positive control). CAP recovery in the feces ranged from 3×10⁷ PFU/g in the low dose to 1×10¹⁰ PFU/g in the high dose, confirming successful GI passage (FIG. 6C). These levels of CAPs were associated with a significant (p<0.05, Mann-Whitney U test, FDR corrected) dose-dependent reduction in the target E. coli population compared to vehicle treated mice, after 24 h of treatment (Day 3). At the high dose, SNIPR001 led to a 4 logo CFU/g reduction (FIG. 6D). Despite an increased variability in bacterial recovery on day 4, possibly due to clearance of the colonizing strain as illustrated in the vehicle group, similar reductions were observed after 2 days of treatment (Day 4). While the medium dose did not reach statistical significance (p<0.05, Mann-Whitney U test), there was nevertheless a numerical reduction in comparison to the vehicle group. Subsequently, the efficacies of the individual CAPs were compared to the SNIPR001 cocktail in this model. In this experiment a greater reduction in the colonization of the target strain was observed with SNIPR001 compared to any single CAP (which showed a numerical, but not statistically significant reduction) highlighting a benefit in efficacy from the combination (FIG. 6E). We also assayed the resistance profile of randomly sampled surviving bacteria and found no isolates that were resistant to the SNIPR001 cocktail. Overall, this data demonstrates the ability of SNIPR001 to decrease the target E. coli in the GI tract of colonized mice.

### Discussion

[0422] Here we describe the development of SNIPR001 designed to target gut E. coli that frequently translocate in the bloodstream to cause bloodstream infections in patients with hematological cancers who are neutropenic. While fluoroquinolones are being used off-label, these patients continue to have a high morbidity and mortality. The use of traditional antibiotics has yielded important health benefits over the past century. However, in parallel we are now experiencing significant bacterial resistance development, and the number of deaths attributable to bacterial antimicrobial resistance in 2019 has been estimated to 1.27 million, with E. coli being the leading pathogen⁴⁵. Accordingly, new antibiotic modalities are needed to address both the unmet medical need of antimicrobial resistant infections in this vulnerable population. In this study we describe the development of SNIPR001 a novel development candidate with the potential to address these challenges.

[0423] Confirmation of the efficacy of SNIPR001 on a large and clinically relevant strain panels supports the clinical potential of the SNIPR001. The observed 4 log₁₀ reduction of E. coli in our in vivo model is a clear improvement over the previous studies⁴⁹⁵⁰.

[0424] SNIPR001 is an orthogonal antimicrobial approach as it has shown activity in multi-drug resistant strains. In addition, there is emerging evidence that maintaining a normal microbiome is important for upholding immunological tonus and potentially benefiting the outcome of oncology treatments⁵¹, and this has also been recognized in the most recent guidance on prophylactic management of patients at risk of febrile neutropenia⁷. In this context in vitro studies with SNIPR001 have shown specificity towards E. coli with no off-target effects toward any of the tested non-E. coli strains, thereby having a less detrimental effect on the microbiome. In the future, individualized combinations of narrow-spectrum antibiotics such as SNIPR001 may be used first line rather than use in addition to broad-spectrum antibiotics such as fluoroquinolones.

[0425] A clinical study to evaluate the ability of SNIPR001 to ascertain safety and its ability to reduce E. coli in the gut without perturbing the overall gut microbiome is currently ongoing in the US (NCT05277350). We believe that SNIPR001 exemplifies a potentially significant therapeutic advance in the field of antimicrobials for high-risk patient populations and can serve as a blueprint for narrow-spectrum therapies for other life-threatening antimicrobial resistant pathogens in high-risk patient populations.

TABLE 1a
Overview of the four CAPs making up SNIPR001. The
E. coli genes targeted by the five individual
spacers and the sequence are listed in Table 1b.

α15.2 comprises spacers 1, 2, 3
α20.4 comprises spacers 4, 5
α48.4 comprises spacers 4, 5
α51.5 comprises spacers 4, 5

TABLE 1b
The E. coli genes targeted by the five individual spacers
comprised by SNR001 CAPs. and the spacer sequences used in the
CAPs.

| spacer | Target gene | Spacer Sequence |
|---|---|---|
| 1 | bolA | AGTGGGAAGGGTTGCAGGACACCGTCTTTGCC |
| 2 | rpoH | CCGATGTTACCTTCCTGAATCAAATCCGCCTG |
| 3 | fimH | CGAATGACCAGGCATTTACCGACCAGCCCATC |
| 4 | lptA | TGATTGACGGCTACGGTAAACCGGCAACGTTC |
| 5 | murA | GCTGTTAACGTACGTACCGCGCCGCATCCGGC |

### Methods

[0426] Phage isolation was carried out by using E. coli strain panels. In brief, 100 μL of overnight cultures of each E. coli strain were mixed with 100 μL of each phage cocktail or wastewater samples. Following 6 minutes incubation at RT (in this period infection should occur), 3 mL of pre-warmed top agar containing Ca²⁺ were added to the E. coli/phage or wastewater mixtures and poured immediately on a LB plate. Alternatively, 10-fold dilutions of each cocktail were spotted on lawns prepared with isolation strains. After drying, plates were incubated at 37° C. overnight. Plaques were picked from each plate and resuspended in 500 μL of SM buffer, vortexed and stored at 4° C. Ten-fold dilutions were spotted on the isolation strain which the plaque was originally picked from. To increase the likelihood of obtaining plaques corresponding to single phages, the procedure was repeated at least three times. Lysates were prepared from single plaques picked at the previous round of propagation, DNA was extracted, and their genomes were sequenced.

E. coli Panels and Isolation Procedures

[0427] Three E. coli panels, one in-house panel and two clinically relevant panels were included in this study. The in-house panel consisted of 429 phylogenetically diverse E. coli strains, isolated from the blood of patients with bloodstream infections and urinary tract infections, from feces of humans with no known disease, from animals and the environment. The strains cover seven different phylogroups (A, B1, B2, C, D, E, F), 114 multi-locus sequence typing (MLST) groups, serotypes (K- and O-type), antibiotic resistance profiles, and different geographical locations of isolation.

[0428] The JMI panel comprises of 382 strain E. coli clinical collection obtained from JMI Laboratories (North Liberty, IA, USA). These strains were isolated from patients with bloodstream infections hospitalized in hematology and oncology units across four different regions (Asia-Pacific 54 isolates, Europe 161 isolates, Latin America 26 isolates, and North America 141 isolates), sourced through the SENTRY Antimicrobial Surveillance Program (2018-2020), which is composed of a network of more than 150 medical centers in more than 28 countries worldwide (https://www.jmilabs.com/sentry-surveillance-program).

[0429] Finally, the panel comprising of 72 fluoroquinolone-resistant E. coli strains are isolated from either fecal samples or perianal swabs of hematological cancer patients hospitalized for hematopoietic cell transplantation^{53,54}.

[0430] E. coli strains were cultivated at 37° C. in lysogeny broth (LB) at 250 rpm in liquid media or on agar plates containing 1.5% (w/v) agar. When necessary, cultures were supplemented with ampicillin (100 μg/mL), kanamycin (50 μg/mL), gentamicin (15 μg/mL) or amikacin (50 μg/mL). All media for the growth of conjugation donor E. coli JKE201⁵⁵ and its derivatives were supplemented with 1,6-diaminopimelic acid (DAP) (80 μg/mL) to complement their auxotrophy.

[0431] Both E. coli strain b52, which was used to produce α15.2, α48.4 and α51.5, and E. coli strain b2479, which was selected to produce α20.4, belong to phylogroup A. Strain E. coli b17 was used as colonizing strain in the in vivo efficacy models as the strain is susceptible to all SNIPR001 CAPs and is part of the SNIPR Biome strain bank.

### Phage Screening by Growth Kinetics

[0432] In vitro susceptibility of the intin-house E. coli panel (n=429) to the 162 WT phages was evaluated using a growth kinetics assay. The assay measures the metabolic activity of a bacteria by tracking the reduction of a tetrazolium dye to a purple compound that aggregates during bacterial growth. The colorimetric reading was recorded every 15 min over a 24-h period by using the OmniLog® (Biolog, Hayward, CA, USA)—adapted from Henry et al., 2012⁵⁶. The inhibitory area under the curve (iAUC) was calculated from the kinetic curves over the course of the experiment and was defined as the ratio between the normalized AUC of the phage-treated bacterial growth curve and the bacteria-only control. Susceptibility was defined at iAUC values≥0.2.

Calculation of Bacterial Growth Inhibition Using iAUC

[0433] The growth inhibitory effect of SNIPR001 was determined using growth kinetic curves constructed using the OmniLog® apparatus. To limit technical variability in measurement between timepoints, a cubic smoothing spline function was applied to the data in Scala using the “umontreal.ssj.functionfit” package. To identify appropriate ρ and weight variables, every combination of ρ and weight 0.1 and 0.5 was applied in 0.1 increments (i.e., 0.1, 0.2, . . . 0.5). The spline with the lowest mean absolute error was chosen for AUC calculation. The initial cumulative amount of fluorescent dye at the initial timepoint varies slightly from well to well, leading to an artificial inflation of the AUC of certain wells. Using the best smoothed square spline, the mean signal for the first 1.5 h, prior to any measurable growth, was removed from all growth curves to approximate a zero-growth signal intercept. The total incremental AUC (iAUC) was calculated as the sum of the Riemann midpoint sums for each timepoint along the smoothed square spline. Lastly, we calculated the iAUC as iAUC=1−AUC_{Sample}/AUC_{Control}, where AUC_{Sample} is the AUC of the spline created by a given bacteria and SNIPR001, while AUC_{Control} refers to the AUC of the spline created with a given bacteria without a given phage or CAP, or a combination of those. Thus, iAUC values usually lie between 0 and 1, where 0 indicates no growth inhibition and 1 indicates complete growth inhibition. Some biological and technical noise does result in iAUC values outside these bounds on occasion but is considered negligible.

[0434] Host-range was calculated as the fraction of a panel that had an iAUC<0.2 for each repeat. Reported standard deviations were calculated as the deviance in the number of strains with an iAUC<0.2, and then normalized to the size of the panel, by dividing the standard deviation with the size of the panel.

CRISPR-Cas-Arming Phages to Target E. coli

[0435] Phages were CRISPR-Cas-armed by using homologous recombination. We inserted the payload in the region immediately after gene 49 and to gene E when compared to a reference wild-type T2 phage. Thus, the synthetic phage genomes comprised the insertion between coordinates 9000 and 21000, wherein the coordinates are the nucleotide positions counted from the nucleotide (coordinate number 1) immediately after gene 49 towards gene E when compared to a reference wild-type T2 phage. Recombination was carried out in bacterial cells during phage propagation. Cells carried a plasmid that served as a recombination template. Recombination template plasmids carried the sequences that were aimed to be inserted into the phage genome between ˜200-700 bp flanking sequences that were homologous to the phage sequences at the insertion site. For each phage, we inserted the Type-I-E CRISPR-Cas system endogenous to E. coli (Genbank CP032679.1), i.e., the cas3 gene (ygcB) and the downstream genes encoding the cascade complex, casA (ygcL), casB (ygcK), casC (ygcJ), casD (ygcI) and casE (ygcH), as well as a CRISPR array targeting selected E. coli sequences. For all CAPs selected, the cas genes originating from E. coli are identical. Insertion of the CRISPR-Cas system resulted in deletion of ˜7 kbp deletion of phage DNA in the gene 49-gene E. The sequences of the resulting CAPs were verified by NGS (BaseClear, Leiden, The Netherlands).

### Transduction of CGVs in Biofilms

[0436] E. coli b52 cells were grown in 96-well plates, and biofilms were allowed to develop on peg lids. Each well contained 180 μL M9 medium (Sigma, M6030) supplemented with 20 mM Glucose, 2 mM MgSO₄, 0.1 mM CaCl₂), 0.1% Amicase (Sigma), and 0.1% mannitol. Wells were inoculated with 1 μL of overnight b52 culture. The peg lid was inserted, and the microtiter plate was incubated static for 24 hours at 37° C. Next, the peg lid was transferred to a new plate with fresh media without washing, and the plate was incubated for an additional 24 hours. After incubation, a new plate was prepared with 100 μL media and 100 μL of CGV transducing particles (˜10⁸ particles) in each well (3 replicates). Biofilms grown on the pegs were rinsed 3 times in sterile H₂0 (200 μl) before transferring them to the new plate. The plate was incubated static for 5 hours at 37° C.

[0437] To assay the metabolic activity of cells in the biofilms, lids were rinsed three times in sterile H₂0 (200 μL) before placing them in a plate with 20 μL Alamarblue stain (ThermoFisher) and 180 μl media in each well. Plates were incubated for 1.5 hours at 37° C. and moved to a microplate reader (Synergy H1, Biotek). Fluorescence (excitation: 560 nm; emission 590 nm) and absorbance (600 nm) was recorded for each well.

[0438] The metabolic activities of the biofilms treated with CGVs carrying the promoter P_{bolA} were reported relative to the metabolic activities of biofilms treated with a CGV not carrying a promoter transcribing the cas genes.

### Plasmid and Strain Construction

[0439] Plasmids were constructed by InFusion HD cloning using PCR-generated DNA fragments. To construct CGV-EcCas, cas3 and cascade genes from E. coli were amplified and cloned into a ColE1-type plasmid, pZE21⁵⁷. Additionally, a 3-spacer array targeting genes in E. coli was included in the vector under the control of constitutive promoter J23100. The array contains nucleotides from the genome of E. coli per target locus separated by direct repeats (repeat sequence, SEQ ID NO: 15). The protospacer adjacent motif (PAM) is located adjacent to the selected target sequences in the genome of E. coli.

### Transformation Assays

[0440] Overnight cultures were diluted (1:100) in fresh LB medium and grown to mid-exponential phase (OD₆₀₀≈0.6). Subsequently, cells were prepared for electroporation and concentrated 50-fold in ice-cold MilliQ water. Cells were then electroporated with appropriate plasmids, allowed to recover for 1 h at 37° C. in super optimal broth (SOB), and plated on LB plates supplemented with antibiotics.

### Conjugation Assays

[0441] Conjugation experiments assessing the transfer and killing efficiency of CGV-EcCas were established using E. coli JKE201 as the donor and E. coli clinical isolates as recipients (including target and non-target and E. coli strains as controls). Plasmids were conjugated into E. coli recipients by liquid mating. Briefly, overnight cultures were diluted (1:100) in fresh LB medium, grown to OD₆₀₀≈0.4, washed, and suspended in fresh LB to OD₆₀₀≈0.25. 125 μl of donor and 25 μl of recipient cell suspensions were mixed for 5:1 mating in a 96-well microplate and incubated for 16 h at 37° C. The conjugation efficiency was determined by plating a dilution series of conjugation reactions onto LB agar supplemented with antibiotics (to select for the transconjugants). The specific killing efficiency was quantified by plating 90 μL of the conjugation reactions on selective plates. The CGV-EcCas plasmid encodes kanamycin, gentamycin, and amikacin resistance to enable selection for transconjugants. Viability was calculated by counting CFUs on the plates, and data were recorded as viable cell concentration (CFU/mL).

### Synchronized CAP Infection and Cas3 Expression Assay

[0442] An overnight culture of the test strain in LB was 100-fold diluted and incubated to stationary phase in LB at 37° C. with shaking, and 10-mL aliquots were subsequently separated into 50-mL falcon tubes. Each aliquot was then seeded with 50 μL of high-titer lysate of the individual CAPs, and incubation was continued under the same conditions. Additionally, a mock 10 mL LB volume for each CAPs were also seeded with 50 μL of CAP lysates and used for 0 min phage enumeration. At 5 min, 15 min and 30 min post-seeding, aliquots were collected for total RNA extraction and phage enumeration. Phage enumeration aliquots were syringe filtered (0.2 μm, Sartorious, Göttingen, Germany) and subjected to an efficiency of plating assay. For total RNA extraction, 1 mL aliquots of individual cultures were centrifuged at 13.3 k×g using a table-top centrifuge for 15 s, and supernatants were discarded. Then, pellets were immediately resuspended in cold RNA Later (Thermo Fischer Scientific, AM7020) and stored at −20° C. until extraction. Total RNA was extracted using a GeneElute Total RNA kit (Sigma-Aldrich, St. Louis, MO, USA) following the manufacture's protocol for extraction of RNA from bacteria. After first elution, 1 μL of Dnase I (1 U/μL) was added and incubated overnight at 37° C. The reaction was terminated by incubation at 70° C. for 15 min. The RNA was re-purified on a GeneElute column and eluted in 35 μL of kit elution buffer. Total RNA concentration was estimated on a NanoDrop instrument (Thermo Scientific, One/OneC), and 0.5 to 2 μg of RNA was added to a cDNA synthesis reaction containing SuperScriptIII RT enzyme (Thermo Fisher, Waltham, MA, USA) and random decamers to prime synthesis in a 20-μL reaction volume. The cDNA reaction was diluted to 100 μL in water. Real-Time PCR was conducted in triplicate using 5 μL of cDNA as template, 10 μL of Power SYBR Green PCR Master mix (Thermo Fisher) and 0.2 μM of each PCR primer. PCRs were performed on an AB QuantStudio5 system (Applied Biosystems, Foster City, CA, USA) using the standard two-step thermocycling protocol for Power SYBR Green PCR Master Mix with 60° C. annealing/extension. The forward and reverse primers for gapA (reference gene) were 5′-cgctaacttcgacaaatatgctggc-3′ (SEQ ID NO: 17), and 5′-aggacgggatgatgttctgggaa-3′ (SEQ ID NO: 18), and for cas3 were 5′-caagtatgctaccaacggctaaag-3′ (SEQ ID NO: 19) and 5′-ccaatcaaaatcaacgtcgagtga-3′ (SEQ ID NO: 20). Single PCR products were confirmed for these primer pairs by melting curve analysis. Relative levels of transcripts were estimated using 10-fold dilutions of purified PCR products as standards, and values were expressed as the ratio of cas3 to gapA transcripts.

### Phage Competition Assay

[0443] Lysates of the two phages were mixed at 9:1 (WT: CAP) ratio and the phage mixtures were added to 10 ml 2×YT medium containing 10 mM CaCl₂) and 20 mM MgCl₂, and 100 μL overnight of E. coli strain b230, serving as target for both competing phages. After 2 h incubation in a 37° C. shaking incubator, the cultures were centrifuged and 1 μL of the supernatant was added to a new b230 culture. The same steps were repeated twice.

[0444] The ratio of phages was assessed by PCR with three primers, resulting in two specific products, one for the WT phage and one for the CAP. PCR products were separated on a 1% agarose gel and DNA bands were stained by SYBRsafe and visualized and quantified by the ChemiDoc XRS+ System (Model 1708265, Biorad). The background-corrected intensity of the band corresponding to the WT phage was divided by the intensity of the band corresponding to the CAP in the same lane, to obtain the ratio of the two band intensities (WT/CAP). The fraction of CAP compared to the total phage content (WT+CAP) were determined based on the calibration curve, which was made by using a set of different mixtures of the two phages, and fitting a curve to the measured band intensity ratios (WT/CAP). The estimated error of the reported values is less than 20%.

### Lawn Killing Assay

[0445] An overnight culture of the test strain in LB was adjusted to 10⁹ CFU/mL. Hundred μL aliquots of CFU/mL adjusted strain was mixed with 100 μL of 10⁹ PFU/mL to achieve a multiplicity of infection of 1 of either CAP α15.2 or WT α15 in 15 mL falcon tubes, mixed with 3 mL of molten and pre-tempered top agar and spread on LB plates. After lawns were solidified, plates were incubated at 37° C. overnight, and the total number of surviving colonies were counted for CAP α15.2 or WT α15 groups the next day. Assays were performed as independent biological duplicates where each experiment comprised of ten technical replicates. Statistical significance was established using both replicates using a Mann-Whitney U test.

### Generalized Transduction Assay

[0446] The transduction ability of each CAP was evaluated via the generalized transduction assay. Briefly, transducing lysates were prepared by propagating each CAP on E. coli MG1655 lamB::Cm. This strain was modified from the WT MG1655 (Catalog number 700926, American Type Culture Collection, Manassas, VA, USA) to carry a chloramphenicol selection marker. Experiments were conducted in parallel with the well characterized lytic T4 phage (negative control), and its transducing mutant T4GT7⁵⁸ (positive control). Following this step, the WT E. coli MG1655 strain was infected at an OD₆₀₀ of 0.3 with each transducing lysate at a MoI of 0.5, 0.1 and 0.01, and spread on LB plates containing chloramphenicol. Next day, the number of transductant colonies were recorded for each CAP, controls and different MOIs. The frequency of transduction was calculated as the number of transductants divided by the titer of the transducing lysate.

### Sequence Analysis of CAPs

[0447] Sequences of the individual SNIPR001 CAPs were analyzed for the presence of antibiotic resistance, virulence genes and lysogeny associates genes (transposases and integrases) using databases (Table 2). Furthermore, phage samples were analyzed using whole genome sequencing. This typically results in >1000× coverage of the whole phage genome. Assemblies are constructed by down-sampling the data to 1000× average coverage for the phage and assemble using SKESA. To detect differences between samples and to detect non-majority mutations the raw reads were mapped back to the assembly using BWA (version 0.7.17).

TABLE 2
List of databases used for the analysis of SNIPR001 CAP sequences

| Database | Source | Analysis |
|---|---|---|
| ResFinder 4.1 | https://cge.cbs.dtu.dk/services/ResFinder | Identification of acquired genes and/or chromosomal |
| | | mutations mediating antimicrobial resistance |
| VirulenceFinder-2.0 | https://cge.cbs.dtu.dk/services/VirulenceFinder/ | Detection of virulence genes including exotoxins |
| PHASTER | https://phaster.ca/ | Detection of potential transposases and integrases |
| Prophage/Virus DB | | |

### Phage Specificity Assay Using Liquid Killing Assay

[0448] SNIPR001 CAPs (α15.2, α20.4, α48.4 and α51.5) and SNIPR001 killing specificity was evaluated via a biopotency assay against a panel of human-relevant, aerobic (n=6) and anaerobic (n=3) bacterial strains. An E. coli strain b2480, was included as positive control for phage-mediated killing (Table 3).

[0449] In brief, overnight cultures were adjusted to 106 CFU/mL in LB broth. SNIPR001 CAPs or SNIPR001 (in which each CAP was combined in equal ratio) were added at a MOI of 1 prior to incubation for 4 h. Untreated bacteria were cultured in parallel as controls for bacterial growth. CFU counts were recorded at 0 and 4 h post phage-treatment, and data are represented as Δ log₁₀ CFU/mL by subtracting the initial inoculum (0 h) from the assay end point CFU/mL (4 h).

TABLE 3
Panel of bacterial strains (Aerobic: n = 6,
Anaerobic: n = 3, Aerobic/Anaerobic: n =
1) tested via a biopotency assay, showing Gram-type
classification, growth conditions and source/ID

| | | Growth | |
|---|---|---|---|
| Strain/name | Gram type | condition | Source/ID |
| Acinetobacter baylyi | Negative | Aerobic | ATCC 33304 |
| Klebsiella pneumonia | Negative | Aerobic | SNIPR Biome ID |
| | | | b2951 |
| Enterococcus faecalis | Positive | Aerobic | ATCC 47077 |
| (Andrewes and Horder) | | | |
| Schleifer and Kipper- | | | |
| Balz | | | |
| Streptococcus | Positive | Aerobic | ATCC 19258 |
| thermophilus Orla- | | | |
| Jensen | | | |
| Bacillus coagulans | Positive | Aerobic | ATCC 7050 |
| Hammer | | | |
| Staphylococcus aureus | Positive | Aerobic | ATCC 12600 |
| subsp. Aureus | | | |
| Rosenbach | | | |
| Eubacterium limosum | Positive | Anaerobic | ATCC 8486 |
| Eggerth | | | |
| Bacteroides vulgatus | Negative | Anaerobic | ATCC 8482 |
| Eggerth and Gagnon | | | |
| Bacteroides | Negative | Anaerobic | ATCC 29148 |
| thetaiotaomicron | | | |
| (Distaso) Castellani | | | |
| and Chalmers | | | |
| E. coli | Negative | Aerobic/ | Takara Cat. |
| | | Anaerobic | |
| | | | #636763 |

### Spotting Assay and Efficiency of Plating (EoP)

[0450] For counting of phage titers, phage lysates or the equal volume mix of SNIPR001 CAPs were serially diluted 10-fold in SM buffer or PBS, respectively. Bacterial lawns were prepared by adding 100 or 300 μL of bacterial overnight culture to 3 or 10 mL of 0.5% top agar (containing Ca²⁺ and Mg²⁺), which was vortexed briefly and poured onto a round or square LB plate. Five μl of the dilution series of test phages were then spotted onto lawns and left to dry at room temperature with an open lid prior to incubation at 37° C. overnight. The strains b52, b2479 and b17 were used as controls of the assay and included in each round of assays.

[0451] The next day, results were assessed (Table 4). In this assay, a susceptible strain is defined as one producing plaques that are countable in PFU/mL as well as one without visible plaques but demonstrating impairment of bacterial growth (i.e., lysis zones). Coverage defines the percentage of the total number of susceptible strains. Images of all plates were recorded. Figures illustrating efficiency of plating results first had titers log₁₀ transformed and then standard deviances and averages were calculated subsequently. The clinical panels and control strains were tested in two independent experiments.

TABLE 4
Criteria used to evaluate results of the spot assay and
define strain susceptibility following standards^{46, 59}

| Spot assay | | Strain susceptibility |
|---|---|---|
| categories | Observation | to SNIPR001 |
| Plaques | Visible plaques were counted, and | Susceptible strain |
| | PFU/mL was calculated by | |
| | multiplying with volume and | |
| | dilution | |
| Lysis zone | Impairment of bacterial growth | Susceptible strain |
| | observed as lysis zones. No plaques | |
| | are visible; the highest dilution of | |
| | visible zones is recorded | |
| Negative | Neither plaques nor lysis zones are | Non-susceptible strain |
| | detected | |

### Animals and Housing

[0452] Mouse studies were performed with female CD-1® IGS mice (approximately 6-7 weeks of age upon arrival) from Charles River (Freiburg, Germany). The animals were housed in groups of 3 to 5 mice per cage within a climate-controlled room (temperature 20-23° C.; relative humidity 30-70%) under a 12:12 h light-dark cycle (illuminated 07:00-19:00). Standard pelleted chow and tap water were available ad libitum. Animals were allowed an acclimatization period of at least 7 d before the start of the experimental procedures. 30 female Göttingen minipigs (approximately 4-7 months of age upon arrival) from Ellegaard Göttingen minipigs A/S, Denmark was used for tolerability and kinetic studies. Animals were allowed an acclimatization period of at least 14 days before the start of experiments. Pigs were housed in groups of 2 to 3 animals and given standard pig diet twice daily and tap water was available ad libitum. All procedures were conducted in accordance with guidelines from the Danish Animal Experiments Inspectorate, Ministry of Environment and Food of Denmark and in accordance with the institutional license (BioAdvice, animal license no. 2015-15-0201-00540).

### Mouse Gut Colonization Model

[0453] The mouse gut colonization model was adapted from Galtier et al. (2016)⁴⁴. Briefly, pre-treatment with streptomycin (5 g/L) in the drinking water was given 3 days prior inoculation with E. coli b17 to decrease the level of native bacteria. On day 0, an inoculum of 3×10⁷ CFU of E. coli b17 was prepared from a frozen glycerol stock and administered to all mice in 0.25 mL by oral gavage.

[0454] Treatment was administered three times daily for 2 days starting 2 days after inoculation. Right before each administration, the 4 CAPs were mixed in a 1:1:1:1 ratio to form SNIPR001 at a high, medium, or low concentration resulting in dose levels of 2×10¹¹, 2×10⁹ and 1×10⁷ PFU. At the time of treatment, mice were administered 0.1 mL of 10% sodium bicarbonate by oral gavage followed by the oral administration of 0.3 mL of SNIPR001, saline (vehicle) or 43.5 mg/kg gentamicin.

### CAP Recovery and Tolerability Studies

[0455] Göttingen minipigs were first given a cocktail of antibiotic comprising neomycin (60 mg/kg, orally, once daily for 4 days) and cefquinome (2 mg/kg, intramuscular once daily for 3 days) before SNIPR001 or single CAP administration to decrease the level of Gram-negative bacteria in the GI tract and therefore limiting phage replication. Animals were then fasted overnight and lightly sedated before administration of a single CAP, or SNIPR001 cocktail, once orally at 2×10¹² PFU in 100 mL, following an oral administration of 50 mL of 10% sodium bicarbonate. Fecal samples were collected daily for CAPs quantification by plaque assay. In addition, for the tolerability study, blood samples were collected for hematology and blood chemistry analysis, including C-reactive protein, and plaque assay. Animals were closely monitored following SNIPR001 administration, and their body temperature was recorded regularly.

Quantification of E. coli b17 and CAPs in Feces

[0456] Fecal samples were homogenized and serially diluted in SM buffer. Triplicates of 10 μl of each dilution were then spotted on McConkey agar plates (Sigma, M7408) supplemented with streptomycin (1 mg/mL) and incubated for 12 to 16 h at 37° C. for E. coli enumeration.

[0457] Plaque assays were performed for enumeration of CAPs in feces samples. Briefly, homogenized samples were centrifuged at 10,000 g for 10 min, and the supernatant was serially diluted. Triplicates of 10 μl of each dilution were spotted on an E. coli b17 overlay and incubated for 12 to 16 h at 37° C.

[0458] To quantify the presence of in vivo resistors, three colonies from each mice fecal sample in the medium dose group at 3 different time points were picked from the McConkey agar plates. Colonies were incubated for 12 to 16 h at 37° C. in LB broth and used to make top agar overlays on LB agar plates. Then, plates were dried for 15 minutes in the LAF bench. The SNIPR001 cocktail, as well as the 4 individual CAPs, were spotted as a dilution series from 1×10⁵ PUF/mL stocks. As a control, a top agar overlay of colonization strain E. coli b17 was spotted in the same way. Plates were left to dry in the LAF bench with the lid on and subsequently incubated upside down for 12 to 16 h at 37° C.

Whole Genome Sequencing of E. coli Strains from JMI

[0459] Total genomic DNA was extracted and purified using the KingFisher Cell and Tissue DNA kit (Thermo Scientific, Waltham, MA, USA) in a robotic KingFisher™ Flex Magnetic Particle Processor (Thermo Scientific) workstation.

[0460] Total genomic DNA was used as input material for library construction. DNA libraries were prepared using the Nextera XT™ library construction protocol and index kit (Illumina, San Diego, CA, USA) and sequenced on a MiSeq Sequencer (Illumina) using MiSeq Reagent Kits v3 (600 cycle).

### Resistance Phenotype Definitions

[0461] The extended-spectrum β-lactamase (ESBL)-phenotype was defined for Escherichia coli as a minimum inhibitory concentration (MIC) value≥2 mg/L for ceftriaxone, ceftazidime and/or aztreonam (https://clsi.org/).

[0462] Carbapenem-resistant Enterobacterales (CRE) was defined as any isolate displaying imipenem, doripenem, and/or meropenem resistance with MIC>2 mg/L (https://clsi.org/).

### Assembly of Whole Genome Sequencing Data

[0463] Raw sequencing reads were trimmed using Trimmomatic⁶⁰ (version 0.39) with the settings “LEADING:3 TRAILING:3 SLIDINGWINDOW:4:15 MINLEN:36”. Trimmed reads were assembled using SPAdes⁶¹ (version 3.14.1) with default settings. Contigs shorter than 500 bp or with a sequencing depth below 2× were removed from the final assemblies.

Comparative Genomic Methods for Clinical E. coli Strains

[0464] Multi-locus sequence typing (MLST) was performed using MLST262 on the assembled genomes of the E. coli bacteria using default settings, with the MLST database downloaded on Jul. 1, 2021, from the MLST2 repository (https://bitbucket.org/genomicepidemiology/mlst_db/src/master/). Phylogroup classification was conducted using ClermonTyping⁶³ on the assembled E. coli genomes using default settings. Distance matrices for phylogenetic tree construction were generated using MASH⁶⁴ with a k-mer size of 21 and 10,000 sketches per genome. Sketches were then compared to create the MASH-distance in a pairwise manner to create a distance matrix of E. coli genomes.

### Phage Synteny Analysis

[0465] To generate the synteny plot, wild type sequences of the four phages included in the final cocktail, plus the two closely related and well-known reference phages (RB69 AY303349.1, and T2 NC_054931.1) were annotated with RAST to extract predicted protein sequences. All protein sequences for each phage were queried again all other phage genomes using tblastn (v 2.12.0), with an E-value cutoff of 1e-10. The synteny plot was then generated using a custom Python script (see Data Availability), using the drawSvg library (v 1.9.0). The plot shows the phage genomes in order of similarity and displays all tblastn hits as synteny blocks shaded by their protein identity. The proteins of the two reference phages were manually classified as belonging to each of the functional groups “DNA metabolism”, “Structure” or “Other”, and colored accordingly.

### Data Processing and Visualization

[0466] Figures and key statistics were generated using R version 4.1.0. For figure generation the following packages were used: RcolorBrewer v. 1.1-2, ape v. 5.5, ggsignif v. 0.6.2, ggpubr v. 0.4.0, matrixStats 0.59, reshape2 v. 1.4.4, ggimage v. 0.3.0, here v. 1.0.1, purr v. 0.3.4, ggtree65 v. 3.0.2, systemfonts v. 1.0.2, Cairo v. 1.5-12.2, cowplot v. 1.1.1, reaxxl v. 1.3.1, and ggplot2 v.3.3.3. Averages and standard deviations are calculated after transforming the values to the scale shown on a given figure, e.g. when a log₁₀ scale is used, the averages and standard deviations are calculated after log₁₀ transformation.

### Data Availability

[0467] Data and results that were generated during this study is deposited at https://github.com/sniprbiome/SNIPR001_paper. Phage genome sequences are deposited at Genbank under access numbers OQ067373-76

### Code Availability

[0468] All code needed to produce this study is available at https://github.com/sniprbiome/SNIPR001_paper.

### REFERENCES

[0469] 1. Pulte, D., Jansen, L. & Brenner, H. Changes in long term survival after diagnosis with common hematologic malignancies in the early 21st century. Blood Cancer J 10, 56 (2020).
[0470] 2. Riley, M. et al. Epidemiology and Burden of Mucosal Barrier Injury Laboratory-Confirmed Bloodstream Infections in Bone Marrow Transplant and Hematology-Oncology Units. Am J Infect Control 45, S38 (2017).
[0471] 3. Dandoy, C. E. et al. Incidence, Risk Factors, and Outcomes of Patients Who Develop Mucosal Barrier Injury-Laboratory Confirmed Bloodstream Infections in the First 100 Days After Allogeneic Hematopoietic Stem Cell Transplant. Jama Netw Open 3, e1918668 (2020).
[0472] 4. Velden, W. J. F. M., Herbers, A. H. E., Netea, M. G. & Blijlevens, N. M. A. Mucosal barrier injury, fever and infection in neutropenic patients with cancer: introducing the paradigm febrile mucositis. Brit J Haematol 167, 441-452 (2014).
[0473] 5. Girmenia, C. et al. Incidence, Risk Factors and Outcome of Pre-engraftment Gram-Negative Bacteremia After Allogeneic and Autologous Hematopoietic Stem Cell Transplantation: An Italian Prospective Multicenter Survey. Clin Infect Dis 65, 1884-1896 (2017).
[0474] 6. Klastersky, J. et al. Bacteraemia in febrile neutropenic cancer patients. Int J Antimicrob Ag 30, 51-59 (2007).
[0475] 7. Taplitz, R. A. et al. Antimicrobial Prophylaxis for Adult Patients With Cancer-Related Immunosuppression: ASCO and IDSA Clinical Practice Guideline Update. J Clin Oncol 36, JCO.18.00374 (2018).
[0476] 8. Cullen, M. et al. Antibacterial Prophylaxis after Chemotherapy for Solid Tumors and Lymphomas. New Engl J Med 353, 988-998 (2005).
[0477] 9. Bucaneve, G. et al. Levofloxacin to Prevent Bacterial Infection in Patients with Cancer and Neutropenia. New Engl J Medicine 353, 977-987 (2005).
[0478] 10. See, I., Freifeld, A. G. & Magill, S. S. Causative Organisms and Associated Antimicrobial Resistance in Healthcare-Associated, Central Line-Associated Bloodstream Infections From Oncology Settings, 2009-2012. Clin Infect Dis 62, 1203-1209 (2016).
[0479] 11. Trecarichi, E. M. et al. Current epidemiology and antimicrobial resistance data for bacterial bloodstream infections in patients with hematologic malignancies: an Italian multicentre prospective survey. Clin Microbiol Infec 21, 337-343 (2015).
[0480] 12. Marín, M. et al. Factors influencing mortality in neutropenic patients with haematologic malignancies or solid tumours with bloodstream infection. Clin Microbiol Infec 21, 583-590 (2015).
[0481] 13. Averbuch, D. et al. Antimicrobial Resistance in Gram-Negative Rods Causing Bacteremia in Hematopoietic Stem Cell Transplant Recipients: Intercontinental Prospective Study of the Infectious Diseases Working Party of the European Bone Marrow Transplantation Group. Clin Infect Dis 65, 1819-1828 (2017).
[0482] 14. Miȩdzybrodzki, R. et al. Bacteriophages. 1-31 (2018) doi: 10.1007/978-3-319-40598-8_31-1.
[0483] 15. Miȩdzybrodzki, R. et al. Bacteriophages. 921-951 (2021) doi: 10.1007/978-3-319-41986-2_31.
[0484] 16. Schooley, R. T. et al. Development and Use of Personalized Bacteriophage-Based Therapeutic Cocktails To Treat a Patient with a Disseminated Resistant Acinetobacter baumannii Infection. Antimicrob Agents Ch 61, (2017).
[0485] 17. Dedrick, R. M. et al. Engineered bacteriophages for treatment of a patient with a disseminated drug resistant Mycobacterium abscessus. Nat Med 25, 730-733 (2019).
[0486] 18. Jennes, S. et al. Use of bacteriophages in the treatment of colistin-only-sensitive Pseudomonas aeruginosa septicaemia in a patient with acute kidney injury—a case report. Crit Care 21, 129 (2017).
[0487] 19. Jault, P. et al. Efficacy and tolerability of a cocktail of bacteriophages to treat burn wounds infected by Pseudomonas aeruginosa (PhagoBurn): a randomised, controlled, double-blind phase ½ trial. Lancet Infect Dis 19, 35-45 (2018).
[0488] 20. Sarker, S. A. et al. Oral Phage Therapy of Acute Bacterial Diarrhea With Two Coliphage Preparations: A Randomized Trial in Children From Bangladesh. Ebiomedicine 4, 124-137 (2016).
[0489] 21. Leitner, L. et al. Intravesical bacteriophages for treating urinary tract infections in patients undergoing transurethral resection of the prostate: a randomised, placebo-controlled, double-blind clinical trial. Lancet Infect Dis 21, 427-436 (2020).
[0490] 22. Sabino, J., Hirten, R. P. & Colombel, J. Review article: bacteriophages in gastroenterology—from biology to clinical applications. Aliment Pharm Therap 51, 53-63 (2020).
[0491] 23. Górski, A., Borysowski, J. & Miȩdzybrodzki, R. Phage Therapy: Towards a Successful Clinical Trial. Antibiotics 9, 827 (2020).
[0492] 24. Federici, S. et al. Targeted suppression of human IBD-associated gut microbiota commensals by phage consortia for treatment of intestinal inflammation. Cell 185, 2879-2898.e24 (2022).
[0493] 25. Kauffman, K. M. et al. Resolving the structure of phage-bacteria interactions in the context of natural diversity. Nat Commun 13, 372 (2022).
[0494] 26. Yehl, K. et al. Engineering Phage Host-Range and Suppressing Bacterial Resistance through Phage Tail Fiber Mutagenesis. Cell 179, 459-469.e9 (2019).
[0495] 27. Westra, E. R. et al. CRISPR Immunity Relies on the Consecutive Binding and Degradation of Negatively Supercoiled Invader DNA by Cascade and Cas3. Mol Cell 46, 595-605 (2012).
[0496] 28. Sinkunas, T. et al. Cas3 is a single-stranded DNA nuclease and ATP-dependent helicase in the CRISPR/Cas immune system. Embo J 30, 1335-1342 (2011).
[0497] 29. Bikard, D. et al. Development of sequence-specific antimicrobials based on programmable CRISPR-Cas nucleases. Nat Biotechnol 32, 1146-1150 (2014).
[0498] 30. Citorik, R. J., Mimee, M. & Lu, T. K. Sequence-specific antimicrobials using efficiently delivered RNA-guided nucleases. Nat Biotechnol 32, 1141-1145 (2014).
[0499] 31. Selle, K. et al. In Vivo Targeting of Clostridioides difficile Using Phage-Delivered CRISPR-Cas3 Antimicrobials. Mbio 11, e00019-20 (2020).
[0500] 32. Neil, K. et al. High-efficiency delivery of CRISPR-Cas9 by engineered probiotics enables precise microbiome editing. Mol Syst Biol 17, e10335 (2021).
[0501] 33. Edgar, R. & Qimron, U. The Escherichia coli CRISPR system protects from λ lysogenization, lysogens, and prophage induction. J Bacteriol 192, 6291-4 (2010).
[0502] 34. Hsu, B. B. et al. In situ reprogramming of gut bacteria by oral delivery. Nat Commun 11, 5030 (2020).
[0503] 35. Yosef, I., Manor, M., Kiro, R. & Qimron, U. Temperate and lytic bacteriophages programmed to sensitize and kill antibiotic-resistant bacteria. Proc National Acad Sci 112, 7267-7272 (2015).
[0504] 36. Ochman, H. & Selander, R. K. Standard reference strains of Escherichia coli from natural populations. J Bacteriol 157, 690-3 (1984).
[0505] 37. Oechslin, F. Resistance Development to Bacteriophages Occurring during Bacteriophage Therapy. Viruses 10, 351 (2018).
[0506] 38. Dunne, M. et al. Salmonella Phage S16 Tail Fiber Adhesin Features a Rare Polyglycine Rich Domain for Host Recognition. Structure 26, 1573-1582.e4 (2018).
[0507] 39. Brouns, S. J. J. et al. Small CRISPR RNAs Guide Antiviral Defense in Prokaryotes. Science 321, 960-964 (2008).
[0508] 40. Knight, D. & Girling, K. Gut flora in health and disease. Lancet 361, 1831 (2003).
[0509] 41. Christensen, S. K., Mikkelsen, M., Pedersen, K. & Gerdes, K. RelE, a global inhibitor of translation, is activated during nutritional stress. Proc National Acad Sci 98, 14328-14333 (2001).
[0510] 42. Vieira, H. L. A., Freire, P. & Arraiano, C. M. Effect of Escherichia coli Morphogene bolA on Biofilms. Appl Environ Microb 70, 5682-5684 (2004).
[0511] 43. Uribe, R. V. et al. Bacterial resistance to CRISPR-Cas antimicrobials. Sci Rep-uk 11, 17267 (2021).
[0512] 44. Galtier, M. et al. Bacteriophages to reduce gut carriage of antibiotic resistant uropathogens with low impact on microbiota composition. Environ Microbiol 18, 2237-2245 (2016).
[0513] 45. Antimicrobial Resistance Collaborators. Global burden of bacterial antimicrobial resistance in 2019: a systematic analysis. Lancet 399, 629-655 (2022).
[0514] 46. Hyman, P. & Abedon, S. T. Bacteriophage host range and bacterial resistance. Adv Appl Microbiol 70, 217-48 (2010).
[0515] 47. Lemay, M.-L., Renaud, A., Rousseau, G. & Moineau, S. Targeted Genome Editing of Virulent Phages Using CRISPR-Cas9. Bio-protocol 8, e2674 (2018).
[0516] 48. Yehl, K. et al. Engineering Phage Host-Range and Suppressing Bacterial Resistance through Phage Tail Fiber Mutagenesis. Cell 179, 459-469.e9 (2019).
[0517] 49. Selle, K. et al. In Vivo Targeting of Clostridioides difficile Using Phage-Delivered CRISPR-Cas3 Antimicrobials. Mbio 11, e00019-20 (2020).
[0518] 50. Lam, K. N. et al. Phage-delivered CRISPR-Cas9 for strain-specific depletion and genomic deletions in the gut microbiome. Cell Reports 37, 109930-109930 (2021).
[0519] 51. Lee, K. A. et al. The gut microbiome: what the oncologist ought to know. Brit J Cancer 125, 1197-1209 (2021).
[0520] 52. Gencay, Y. E., Ayaz, N. D., Copuroglu, G. & Erol, I. Biocontrol of Shiga Toxigenic Escherichia coli O157:H7 in Turkish Raw Meatball by Bacteriophage. J Food Safety 36, 120-131 (2016).
[0521] 53. Satlin, M. J. et al. Colonization With Fluoroquinolone-Resistant Enterobacterales Decreases the Effectiveness of Fluoroquinolone Prophylaxis in Hematopoietic Cell Transplant Recipients. Clin Infect Dis 73, 1257-1265 (2021).
[0522] 54. Satlin, M. J. et al. Colonization With Levofloxacin-resistant Extended-spectrum β-Lactamase-producing Enterobacteriaceae and Risk of Bacteremia in Hematopoietic Stem Cell Transplant Recipients. Clin Infect Dis Official Publ Infect Dis Soc Am 67, 1720-1728 (2018).
[0523] 55. Harms, A. et al. A bacterial toxin-antitoxin module is the origin of inter-bacterial and inter-kingdom effectors of Bartonella. Plos Genet 13, e1007077 (2017).
[0524] 56. Henry, M. et al. Development of a high throughput assay for indirectly measuring phage growth using the OmniLog™ system. Bacteriophage 2, 159-167 (2014).
[0525] 57. Lutz, R. & Bujard, H. Independent and Tight Regulation of Transcriptional Units in Escherichia Coli Via the LacR/O, the TetR/O and AraC/11-12 Regulatory Elements. Nucleic Acids Res 25, 1203-1210 (1997).
[0526] 58. Young, K. K., Edlin, G. J. & Wilson, G. G. Genetic analysis of bacteriophage T4 transducing bacteriophages. J Virol 41, 345-347 (1982).
[0527] 59. Gibson, S. B. et al. Constructing and Characterizing Bacteriophage Libraries for Phage Therapy of Human Infections. Front Microbiol 10, 2537 (2019).
[0528] 60. Bolger, A. M., Lohse, M. & Usadel, B. Trimmomatic: a flexible trimmer for Illumina sequence data. Bioinformatics 30, 2114-2120 (2014).
[0529] 61. Bankevich, A. et al. SPAdes: A New Genome Assembly Algorithm and Its Applications to Single-Cell Sequencing. J Comput Biol 19, 455-477 (2012).
[0530] 62. Larsen, M. V. et al. Multilocus Sequence Typing of Total-Genome-Sequenced Bacteria. J Clin Microbiol 50, 1355-1361 (2012).
[0531] 63. Beghain, J., Bridier-Nahmias, A., Nagard, H. L., Denamur, E. & Clermont, O. Clermon Typing: an easy-to-use and accurate in silico method for Escherichia genus strain phylotyping. Microb Genom 4, e000192 (2018).
[0532] 64. Ondov, B. D. et al. Mash: fast genome and metagenome distance estimation using MinHash. Genome Biol 17, 132 (2016).
[0533] 65. Yu, G. Using ggtree to Visualize Data on Tree-Like Structures. Curr Protoc Bioinform 69, e96 (2020).
[0534] 66. Datsenko, K. A. & Wanner, B. L. One-step inactivation of chromosomal genes in Escherichia coli K-12 using PCR products. Proc National Acad Sci 97, 6640-6645 (2000).
[0535] 67. Hantke, K. Compilation of Escherichia coli K-12 outer membrane phage receptors-their function and some historical remarks. Fems Microbiol Lett 367, (2020).

### SEQUENCES

[0536] Amino acid sequences are written in N- to C-terminal direction and DNA sequences are written in 5′ to 3′ direction.

PROTEIN
>LamB (SEQ ID NO: 1)
MMITLRKLPLAVAVAAGVMSAQAMAVDFHGYARSGIGWTGSGGEQQCFQTTGAQSKYRL
GNECETYAELKLGQEVWKEGDKSFYFDTNVAYSVAQQNDWEATDPAFREANVQGKNLIEW
LPGSTIWAGKRFYQRHDVHMIDFYYWDISGPGAGLENIDVGFGKLSLAATRSSEAGGSSSFAS
NNIYDYTNETANDVFDVRLAQMEINPGGTLELGVDYGRANLRDNYRLVDGASKDGWLFTA
EHTQSVLKGFNKFVVQYATDSMTSQGKGLSQGSGVAFDNEKFAYNINNNGHMLRILDHGAI
SMGDNWDMMYVGMYQDINWDNDNGTKWWTVGIRPMYKWTPIMSTVMEIGYDNVESQRT
GDKNNQYKITLAQQWQAGDSIWSRPAIRVFATYAKWDEKWGYDYNGDSKVNPNYGKAVP
ADFNGGSFGRGDSDEWTFGAQMEIWW
>Tsx (SEQ ID NO: 2)
MKKTLLAAGAVLALSSSFTVNAAENDKPQYLSDWWHQSVNVVGSYHTRFGPQIRNDTYLE
YEAFAKKDWFDFYGYADAPVFFGGNSDAKGIWNHGSPLFMEIEPRFSIDKLTNTDLSFGPFK
EWYFANNYIYDMGRNKDGRQSTWYMGLGTDIDTGLPMSLSMNVYAKYQWQNYGAANEN
EWDGYRFKIKYFVPITDLWGGQLSYIGFTNFDWGSDLGDDSGNAINGIKTRTNNSIASSHILA
LNYDHWHYSVVARYWHDGGQWNDDAELNFGNGNFNVRSTGWGGYLVVGYNF
DNA
>LamB (SEQ ID NO: 3)
ATGATGATTACTCTGCGCAAACTTCCTCTGGCGGTTGCCGTCGCAGCGGGCGTAATGTCT
GCTCAGGCAATGGCTGTTGATTTCCACGGCTATGCACGTTCCGGTATTGGCTGGACAGGT
AGCGGCGGTGAACAACAGTGTTTCCAGACTACCGGTGCTCAAAGTAAATACCGTCTTGG
CAACGAATGTGAAACTTATGCTGAATTAAAATTGGGTCAGGAAGTGTGGAAAGAGGGCG
ATAAGAGCTTCTATTTCGACACTAACGTGGCCTATTCCGTCGCGCAACAGAATGACTGGG
AAGCTACCGATCCGGCCTTCCGTGAAGCAAACGTGCAGGGTAAAAACCTGATCGAATGG
CTGCCAGGTTCCACCATCTGGGCAGGTAAGCGCTTCTACCAACGTCATGACGTTCATATG
ATCGACTTCTACTACTGGGATATTTCTGGTCCTGGTGCCGGTCTGGAAAACATCGATGTT
GGCTTCGGTAAACTCTCTCTGGCAGCAACCCGCTCCTCTGAAGCTGGTGGTTCTTCCTCTT
TTGCCAGCAACAATATTTATGACTATACCAACGAAACCGCGAACGACGTTTTCGATGTGC
GTTTAGCGCAGATGGAAATCAACCCGGGCGGCACATTAGAACTGGGTGTCGACTACGGT
CGTGCCAACCTGCGTGATAACTATCGTCTGGTTGATGGCGCATCGAAAGACGGCTGGTTA
TTCACTGCTGAACATACTCAGAGTGTCCTGAAGGGCTTTAACAAGTTTGTTGTTCAGTAC
GCTACTGACTCGATGACCTCGCAGGGTAAAGGTCTGTCGCAGGGTTCTGGCGTCGCGTTT
GATAACGAAAAATTTGCCTACAATATCAACAACAACGGTCACATGCTGCGTATCCTCGAC
CACGGTGCGATCTCCATGGGCGACAACTGGGACATGATGTACGTGGGTATGTACCAGGA
TATCAACTGGGATAACGACAACGGCACCAAGTGGTGGACCGTTGGTATTCGCCCGATGT
ACAAGTGGACGCCAATCATGAGCACCGTGATGGAAATCGGCTACGACAACGTCGAATCC
CAGCGCACCGGCGACAAGAACAATCAGTACAAAATTACCCTCGCACAACAATGGCAGGC
TGGCGACAGCATCTGGTCACGCCCGGCTATTCGTGTCTTCGCAACCTACGCCAAGTGGGA
TGAGAAATGGGGTTATGACTACAACGGCGATAGCAAGGTTAACCCGAACTACGGCAAAG
CCGTTCCTGCTGATTTCAACGGCGGCAGCTTCGGTCGTGGCGACAGCGACGAGTGGACCT
TCGGTGCCCAGATGGAAATCTGGTGGTAA
>Tsx (SEQ ID NO: 4)
ATGAAAAAAACATTACTGGCAGCCGGTGCGGTACTGGCGCTCTCTTCGTCTTTTACTGTC
AACGCAGCTGAAAACGACAAACCGCAGTATCTTTCCGACTGGTGGCACCAGAGCGTTAA
CGTTGTCGGAAGCTATCACACCCGTTTCGGACCGCAGATCCGCAACGATACCTACCTTGA
GTACGAAGCATTCGCTAAAAAAGACTGGTTCGACTTCTATGGTTATGCGGATGCGCCGGT
ATTCTTCGGCGGTAACTCCGATGCAAAAGGTATCTGGAACCACGGTTCTCCGCTGTTTAT
GGAAATCGAACCACGTTTCTCCATCGACAAGCTGACCAATACTGACCTTAGCTTCGGTCC
GTTCAAAGAGTGGTACTTCGCGAACAACTACATTTACGACATGGGTCGTAATAAAGATG
GTCGCCAGAGCACCTGGTACATGGGTCTGGGTACCGATATCGACACTGGCCTGCCGATG
AGCCTGTCCATGAACGTCTATGCGAAATACCAGTGGCAGAACTATGGCGCAGCGAACGA
AAACGAGTGGGACGGTTACCGTTTCAAAATTAAATACTTTGTGCCGATTACCGATCTGTG
GGGCGGTCAGCTGAGCTACATCGGCTTCACCAACTTCGACTGGGGTTCCGATTTAGGGGA
TGACAGCGGTAACGCAATCAACGGTATTAAGACCCGTACTAATAACTCTATCGCTTCCAG
CCATATTCTGGCTCTGAACTACGATCACTGGCACTACTCTGTCGTAGCTCGTTACTGGCAC
GACGGTGGTCAGTGGAACGACGATGCAGAACTGAACTTCGGCAACGGCAACTTCAACGT
TCGCTCTACCGGCTGGGGTGGTTACCTGGTAGTAGGTTACAACTTCTGA
>NC_000866.4 Enterobacteria phage T4, complete genome (SEQ ID NO: 5)
AATTTTCCTTATTAGGCCGCAAGGGCCTTCATAGTTTTAGCGATTTGGGAAACTTCATCATCACTTAAAG
AGTTGCGATAACCGATGAAGTCGGAAACAATACGGAATTTCTTGGTAAACTCAGCAACCATTTTATCACT
GTTTTTTGAAGCATTATTTGATAATACATCAAAAAGATTAGTTACTGTCCAAATGTCATGACCGATGGTA
TCTTTTCCACCATTAAAATATACACCCTGTAATGAACTAACCATATTAGCGAGTCGTGTATATTCTTCAG
AAACTTCATCTATACTGAAGTACTTCATCATAAAATCTAACTCAGGATACTTGATAATTTTATCAATATA
TCGTTTAGCTGAACTTGAATAACCTACATACTTATCATAATCTACATCATCAAAAGCATCTACATATAAA
TCACGCAAAGCTTCAAAAATACATTGGCACTGACCGAGTTCTTTTACCTTTTTCTGTAAAAGCGGACGAA
TAACATAAAATTCATTAATGCCAATAAGATTAGCCATACGAATCAAAATATTCATAGATGGATGACAAAG
AGATGTAGTACCATCCATAGAGAAAATATCAGAACGATGCATATACGCTACATAACCAGTAATTTCATCT
GCTTCTGATGTGAGGCGTAAATAATTCCTCTTTTCCCAGCGCCCGTCTTTAATTTCAAACTTAAACGCTG
TAGCAGCTTTAGGACGAGGAGCTTTACTTTTAACTACCTTTGGAATATAACTTTTTACTAAAGCTTCAAT
TTCTGACAAATAATGAATGTTAACTTCATCACTTTCAAACATCGCCATAATATCAGGAAGCAAATCAATC
TGCGATTCTACTTCTGGATTAATAAACAGAAGACGTTCGTTATGATGAATATTCAAAGTGTTATTAAATT
CACTATCATCTAACGCACGTGCTAATCCACGGACAATATTAACACGATTTTTAATATTATCAATAACGAT
ATTAATTTTTGTTGTATTAATACCAAACAGACGATAACTTGATGCAACGGCTGAAGTTTCATGACTTTGC
TTAATGCGCTTCAGTCGAGGGTCAAGATTTACTTCATACACAACTCCCGCGTTGCATAACTTACTGTCAG
GTTCAAACATGCTCTGCATCTTTTTATATGACAGATTTTTAGTCGTGAATTTGACTGAATTACTAATCAT
ATAATCTCGAGCAGAATACCCCATCTTCATCAATTCACGATATGTGTGACGAGGAGATGTAGATTCTTTA
AATCGTTTTACATCTTCATTAAATGCTTTCTCACTGAGTTCTTTAACTCGTTCAATAATATTTTTACGAG
TGCGATCATCCAGTGAAAGAGCCTCGCGAGATGGAGCAATATCAAGTGAACCCATTGGAAACTTAATGTA
ATTCACTTCATTGCGAATGCTTAGCCAGTTACGGTCTCTAATAACACCATCGATAGGATAAACAATACCA
CCGTAGATAGCATATAATCCACCACGATCAGGCCAGTATCTTTCTGGATTTACACCGTAATAGTCATCAA
AATCCGGAAAATAATCAATTTCGCGGTCAAGACCATTAATGATAGCCAAATCTTTGAACGGTCGCATGAT
ATAAGAAACTTCATAAGCAAAGTTTCTAAAGTCTTTTTCTTCAACTGGAACTACGATTTCAATACCAGTT
TTATCATCTGGACCCATTTCTTTTACGAATGTAGGTTTAATCTGTGGACCATCACCATCCATGTAAGCTA
CATAACCACGAATTTCACCTTTATGATACGAAGTAATACTAAACGTATCAGTATAACTAAACGGAGATTT
AGAACCTAAACCAAATCCGCCAATAAAGTCATTAGATTCAGCTTTAGATGAACTGAAGTATGAATTATAC
AACCCAGGAGAATTATCATCACCTTGAATATCAAAATCACTCATACCCGGACCAAAATCTCGACAAACAA
ATCGTGGGTCTAAACGTCCAGGAACTTGTATGATAAATTTTTCAGGATTTCCATTAAGTGCATGAGCATC
AATCATGTTAGTAATCAATTCACGGACTACTGCGCGAATCTTGTTTGTATACAAATCAGATGACAGAATT
TTAAATACTTTAGGAGATGCTGTGATGCTAAATGCTTTTGATTTAGAACCATTACCAAGAATTGTTTCTT
TTTCAGTGGTGATAATCATAATTTCCTCATTAATTCATATTACGCTTAATAACTTCAGCAACTTCTAGTA
GTTCATCTTTAGTTGCGGTGTCGGATTGAATTTTATCTCTAATATCTTTAAAGCGGGTTTTAAATTCTTC
GGCTTCTCCCATATCGAAAAAGCGTTGAATGATTCTATATTCTCGATGAACTGCTTTATCAAAAAGTTCT
AAATTTACTTTATATGATTTCATTTCAATATCCTCATTTGCCCAATTAATTATACCACATCCTTGTGGTA
AAGTAAACTACTGGCTCATCCATTCTTTACGAAGGTCAGCATTATCTCCCATGAGCATTTCAAAAAGCTC
TTTCCAGTTCTCAGGAAGTTTAACAACATCATATACTGGGTTTTGAATCATCTCACGATATTCAGATTTT
TCCAAAGAGCCAAGTCCCTTAATATAACGGATGCTATGTTTAGGTAGAGCATCTTTGGCACTCTCATATT
CAGCGACTGTATAAAACCATTCTTGTTTTTTACCGACCTGAGCGATGATTACAGGAGTTTTGACAAAGCG
AATTCGTCCTTGCTCAAACAATTCTGGCCAATTACTAAAAAATCCGAGCAGAGAAGGATAAATAGAACCT
AATCCAATAATCTCTTAATTATGAGGTATTTCTATAGATAGCCCGAAGGCTATCCATCGTGATCTGCGTC
TGTCATAATAGCGACATTCGCATAGTTCATTGAAGAGGATTTAATAGAACGACGAACATTGTTCTGCAAT
TTATATTTTTTCATATCAACGCTAGAAGAATCAATTTTTACAAATTTCATTATACACCTCATAGAACTTT
TCATCAGGAATCCAACCGCGTTTAAATTCATTAAATGCTCGGCCGAATAATTTTGAATTCACAGTTATAT
TATTAACTGATTTCCATTTAGCAACTCCCGTTCGTTTATAATGATCGGGGTCATATTTCGTGACGTACCA
TTCATATAAATTTGGTATTAATTTTACAGCCTCTGGATTTGTCGCTGATTTATTATACCATGGTTTCGCT
TTTTCAAGTTCAGCTGCTTTTGCAGTAGCAGCAACAGTATTTCCAACACCAACTAATTTTTCAGTTTTAA
TGCGTGGATCATTAACATGAAGACGAAAAACTTCGCCCTTTTCATTTTTAAAGCATGTCATGCCTTTAAT
TCCAGGAAGCTTAACACCTTTATTAACACCGCATCATTCCTTTGGGTTAAATGATCCTTTAATTAATAAG
GCGCATTTACCCGATTTAACTACTTCTCATTCAACAACTTTATCTTTCATAACGTTTTTTGACCATTCAG
ATACTGCTCTTTGATGGCTAAATTCTAGCAATTTCACTATAATTTGCACTAGAACGTAAACTATTTTTCA
GTGTTTCAACATTCTATTCATCGCATATGCCATTTCACGATTACGATGAATTTTATATAGTAGAAAATAG
TGCTAAAAAGTGTTCACGAAAAGTCATGTTTCACCAAATTTTCGTTATCATCAGAACCTCCCATTGATCT
TGGAAGGATATGATGAATTTCACCCTTAAATTTAGAAACGCGGGTTTTACCCCGCACTATTAAGTCATTA
TAGATTTTTTCGTAATTCACCTACTGTTATCCATTTACCATTAATCTGTACTTCATCATTTTCATTTACG
ATAATTGTATCGCCATTTAGCTCGAAAGTAAACCACTCGCCATCTTCTTTTTCTTCAAACGCTTTTTCAC
CGAGAACTAGACCAGTGATTGCGCAAATATCAAATAGTTCTTTGTTTTTAAGCATATCTGCATAAGACAT
ACCCCAACTGTTGAGAACTTTACCACGCAATGGATAACCACCGTGAAGTTCTTTATCACGAACATCAATA
AGATATCCGATAGCCGAATCACCCTCAGTCAAGAAAAGAGTAGTATCAGCATCTTTACCGCAAAGATTCG
CTTTGATATGTTTATGAACCTTAGCTTTAGAAGCCTTTTTAGCTGCTTTAGTTTCTGCTGCTTTTTCTGC
CGCCAATTTACGAGCCAAAGCAGCTTCAATAATCGGCATTAGAATTGCTTCATTATTTAGAATATCACGT
GAAATCTTTTTAGCATCAAGTTGAATATGACTACGAATTTCGCCAAATGGAGAAGTCAAACGCTCTTTAG
TTTGACGAATCAATCGCATGTTTTTCATATCACGAACAAACATAACGATAGTCAAACATTCTTTGACACG
TGCTTTAGTCACATCAATTTTGAACTTACGTTTGATTTGTGGAATAAGGTCTTCACAAATATCATCCATA
GCGCAGTCAATGTGATGGCCACCATTCTTAGTATGAATGTTATTGACGTATGTTAATTGACGAAAACCAT
CCGGTGAACGACCAACCGCAATAGAACAATTTTCTTGCTCTTGAACAATAGCATGTTCATCATACTGCCG
TGCATATTTCTTAAAATTGCCCTGAACCTTTTTACCATTAAAGGTAAATTGAATATCAGGATAAACTACA
GCAAGTGTCTGGAGACGATCCAGTGTAATGTCAAGATAAACTTGGGACAGCTCATTAGTTTCAAATGACA
TAAAATCAGGAATGAAAGTAACACGAGTTCCTTTCCATTTTCCAGGAATATCTTCCCATGATTTATTTTC
CATGCCATTTGAACAACGAACTACAATATTATTTTGACCGTCGCCAGTTTCACCGACAAACATCACAGAA
AAAATGTTTGTCAAACTAGAACCAACACCGTTCATACCGCCGGTGACGCGTTCTTTATCATCACCAAAGT
TACCACCTGCTTTTGGAATAGTCCATGCGGCAACAGGACCAGGAATTTCTTCACCGGTAGGTGTTTTAAC
CATCGCTTGTGGAATACCGCGACCGTTATCTTCAACTGTTACTTGATTGTTTTTAATAGTAACATTAATT
TTATTCGCGAATTTAAACTTAGTACGAATACCTTCATCTACTGAGTTATCGATAATTTCATCAATAAGCT
TAACAAGACCAGGTACATACTGAACACTTTCCCATTTACCAAACATAAAGCGCTCATGCGTTTCATTAGC
AGAAGAGCCAATGTACATGCCACTACGCTTTTTGATATGTTCAATATCGCTCAGAATTTTAATTTCATTC
TTAATCATCACTTATCCTCGTTTGGTTTCGGGAATATTATACTCCGGTAATCATAAAGCTAAAGGCCCGA
AGGCCTTTTATTTAAAACGAATAGTTGAATCCTTAAAGAACAGCCCAGAACATACTGTTCCTTCTACTTT
CTGCCCGGTAGGTCCAATAGCACGAAATCCAGTATGCTGGAAATCATTTTCAGAGCAACCGAACCAATTA
TATCCAGTGATTTCAATATTAGTAAAACCACTTGAAGACAAAACTTTGGTTGCATTAATCAGCATCAGTA
CTATTAATTAAAGACACTGCTAATACTAATGCTGCAATTGAACGACTAATATATTTCATAACTACCCTTT
AAGCAAGTCGTAAAATCCATTATTCCCATGCTTAGGAAGCGGAAACTAACCGAACAGCCAGCCGATGACA
ATCAGGACATACACCAGTATCTCTTCCAGAAATTTTCTTGATTTTTTCGTATTCTTTTGCACAGTCTTTG
GATTGACATTTATAATCATAAAGCGGCATAATTATTCCTTAAAGTAAGCTTTCAACATCTGATATAAAGA
CCACGCCTGATCATTATTTTCAATAGTAACTTTCATGACTGGGAATTCTGTGAAATCTTCTATTTGTTCT
TGCTCTTTCTCTTCCTGCTCTTGCTCTTCAACCGCCTGATATGGATTTTCCACTTCATCAAAGAACCCAG
CTTCGTTAGTAGAGAGCCAGATAAAGTTTTCGTCAAGGATATCACCGCCGGCACAACGTTTGAGTACACC
TATGGATGTCATAATTTTAGTAGGACGCCCAAGATAATCAGCATCTAAAATTTTAAAAGGCTCCATACCT
AAACGTCGTGCATAGATTCCGTTATCAGTATGGTCTTTAATAAAATTTTCTTGAGCTTGTTTATTTTTAA
ATTGATACCATTTATTAACTTCAAATTTAATAGCCATTAATAAATTTCCTTCCAGTAAGTTGTGCCGTCT
TCAGTAATTTCACGAAATACACCATAAATTGGCTGTTTATCACCGACTTTCTCATACACATAAACAGAAG
TCAAGTGAGTAAACTTGCTAGTATGTTCCTTTTGAACTACTACCAAATTTGGATCAAATAATACATCTTC
AAATTCATCATTAGTGCAATTCTGAACAATTTTACGTTTCATTACAATTTCCTCATTAATTGAACAGTGG
AGCGATACGTTTCAGAAGAGTATCAACACCTTTAGCGAATTTTCCATTTTATTCTCCAAGTTGTTTTCTG
TATCAGTAGTTGATATTGATATAGTACCATAATCAACTACTGATGTATATAGTTTTATGAAAAATTTAAA
CTTTATGCATAGAGAGCATTGCTATAGTGTTTAATCCAACTTTCAGGAATGACTTTGTATGTTCCTAAAA
ATACCACGTTGTACAACTTAACACCATCTTCTACCCATTGATCGGTAATGTATCCACACATAGCGCGAGT
ATAAACAACCCTTCCATCATCTTTAATAAAGTTAAATTCACAAGGAGCAATGAACTTGATAGCCTGACCG
AGTTTCCACTTAAAGTCTACACCTACATGCGAAGTATCAATCGTTTCAATTCCTTTAGCAGGAACAGCTT
TTAAAAACGCAGACTCAAGAAATTTCGCACGAACATAGCCAAACTGGGGTTTAGACTTTCCATCTTTAGG
AATGATACGCACTTTTACTTCAGAATCTTCATCTTTAACACCATGCTTAAGCTGAATGCTTACAACTTCG
ACCAATTTTCCTGCTGCTTTAGAACGGGATTTATCAGATACACGAGCTAATTCACCAATATTAATAATCA
TAGTTATCTCTCACTTGTTAAAAAGATTTTATACTCCACGGGACCATTATACTCTGGTCCCAAGAGTTTG
TAAACTATTAATTCAAAATAGCTACCACTGCACTACGAGGAACTACGGAGTACTCTCCAGCATGAACTAC
GTTCAGAAGTTCAACGCCATCTTCCAATCCATTGGTCAGTTACCCAACCACCAATCGGATTCGCAAATGG
ACGACGAATGTAAACTGCCTTACACAACAAATCAGTCGGGTCTTCAGGTTTTTCAATTTCTGTCAATAGA
TTAAAATCTTCTTCATAGATGATGAATGATGATACCCTTCCATAATAGTTTCTAATTTCCATGTACACTG
TACCAATGAGAATTCCACTATTAACACTAATGACAGTAAAAGGATATCCGCCAGTTGTACCAAGAAGTTC
CCAAAATTTGCTATCAGTCGTATTCGACATTGTCTGAAAATCAATTTCAGATGGTTTTTTCATTTGATAC
GCAGTATTAATTTTAATCATAATTTTCTCTTTAGTTTAAGGTAATAAAGCCTTTTAGTTCGGCATAGGAT
TTACGGAACATTACTTGATGCCCGCCAATGATAACTTGGTCATCTGGTACTTCGTATACAGCAAGATAAA
ATCCTTTCGAAGCTAATTCTTCACGCTCTTCTCGTGTGAACCATTTCATCATATCATATTCGCTAGCAAA
AGCAAAATGATAAAGAGCTACAAACCATCCGGGAATATGATATTCTACTCCAACATAATCTTTCTTGAAC
TTAGTATTAATTACGATATTAGCATTTTTAACTAATAGTTTGTCTTCGTGCGGCACAGGAATTCTTTTAT
TATCATTACTATGATGCATAAAATTAGGTCTGTCATAACCTACATGTAATAACCACTCTTCACTCCATGA
ATCTATTATACTTCTATACGGCGTTATTTGAACACAAAGATCTCGGCGTATTGTTATAGCGTCTTCATAA
TTAAGAATACTAAACGATGATTCAACACGATAAATTTTCATTTTATTATCCTCAGTAGCTATGGTGTTAT
AGTACCACAACTAACCGAGGAAGTAAACAACTTTTTATCGTTTTGTTGGAAGAGATAGAGGATCGCATTC
TTCCTCTGATGGAGCATCTTCAAGACCCATAGCATATCGCAAAGCATACTTCATCATCAGGATGTCTTTC
GCACAGTCATGAATAGAATCATGTGCAACGAATCCATCTAAAGTTCCCTTTGGAAGAGGACACGTTGTCA
TATCACGAACAAGCAGAAGTGCTTCAATTCTAGTACGAATATCACGCTGATTCCAAAATTTACAAGGTTC
TAACTTAAATGTATCAAGCTCATTCTCGGAAACGCCGTTAAGACGTTGAATATCGCGAATAAGATCGACT
AAAATTGGAAAATCAAACGACATTCCACGGCACCAGCCTTGAGATTTCCAAGGATCGATATTATGTGCAT
TGATGTAATCATTAAATTTTGCAATACCGTCGATAGTGCTTACATCTTCATCGGATGGTGCAATATTTTT
TCGAGCTTCAGGAGATTGATTCTTCCACCATTCGATAGTACTTTTAGTAAAAAGACGGTGTCCTTTTTGG
CTTTTTAAATCAAATTTGATTTTAATGCCACGTGAAACTAATTCATCGAATGTTTCAACTACTTCTGGAT
TAGGGTCAAAAGCAATTACAGCCAAATCAATAACCGCTGCTTTTTCACCACTTCCCATTGTTTCAAAATC
TATAATAAAATCAAACATTAAATTTTCCTCGCTAAATCACGAATTTGACCTACAGTATAGTCTTGAATAT
AAACTTTATTAATAGGCTCATCAATAAATTTTGCCATAGATTCAATATCTTTTTGTATTTCTTCAAGACT
GTATACTATCTTTGAAGCTTTTTCGCGAATAGTGATATTTTCAGGACCCGGATTTTCTTGAATGACAACT
TTAACATTTGTCATAAGAGATTTAAACTGGTACCAACTTAATTCAATCATTAATAATCGCCTCATAAAGA
TAGCTAATTTCGCCTAAAACATAATCATTGATTGTAACAGTTTTAACTTCACCGCAAAAGAATTCTAACG
CAATTAAATCTCGTTCAATTTCTTCTAATTGAAGCATCAACTTACTAGATTCAATTTTTACAGTTTCACG
ATTTTTGCTATAAGCTATTTCATAAATTTCGCTTACTTTATCTTGAAGAAGATAAAACTGATCTTTAGTT
ATTTCCACGAATAGCTTCCTCAAATTTAATCATACATAAAACACATCATAACGACCACGGGTGACACCAA
CATAAAGAAGTTGTTGAGCTAATTCAACATCTGCATAATGAATACAAGGCGTATAAATGAAAGCACGGTC
TACAGACATACCCTGCGCTTTATGGAATGTTGATGCAGGAAGTGCTTTCACTTTACTAAACTGTGATTTA
GCATCCCAAAAATCACTCCACGGAGCTTTTCCGCCTTTGTTCCAATTTTTATAAGTTTCTGCTGTTTTAG
CTAAAAATAGGTTAAACTTATACAATTCTTCGTCAGATGAAATTATTTTAATCTTTTCACGATAATATTC
ATCATCGCCATAAGTTTCTACTGTTAAATCCCAATGACGAATTAGATATTCTCCAGGAACACCACGGGCT
TTAACAAACGTTGATGTATACTCTGCTTCTATAATACGAACTAATTGTCCGTTATTAAAAATAATTTCTG
ACACAGGCTTTCCATCAATTTTATATGTTTTAAATAATGGTTCCTGCATTACAATAATTTCACCGACAAT
AAAATCTTTATCAGTTTCAAAAATCTTTTTACGAATAATGCTATTTAACTTGTCAACAGATTTATTCGTA
AATGCCATTACGCGATTTTCAAACAAATCATCTAGTGATTTGACGATTGAAAAATAATTTACCATAAAAT
CGCGTAAAGCGGTATCACCAGTAAATCCACGTACTCCATGCCCGTCAACAACTTTATCATAATTCCACTT
ACCGTTGCGAACGTCAGTAGCTACATCAATAATAGGAGCATTACTGCGTTTAACTTCAGTGAGTTCACAC
TGATAAAAATCTTTATGTGTAAAGAATGGACTGATATAAGCAGTATTTTCTCCTGGTTCAACAGGTCTGA
TTTGCTTATTATCCCCTATTCCAATTATAGTACACCAAGGTGGAATAGTTGAAAGCAGAATTTTAAATAG
CTTTCTATCATACATTGACACTTCGTCGCAGATTAATACTCTGCATTTGGCTAAATCAGGTACTTCTTTT
TGTTCAAAAAGAACATTTTCTTCATATGTTACTGGGTTAATTTTAAGAATACTATGAATAGTACTCGCTT
CTTTCCCTGATAGTTTTGAAAGAATCTTTTTAGCTGCATGTGTAGGAGCTGCTAAAATAATACCAGTTCC
ACCCGTAGATATTAAAGCTTCAATGATGAACTTAGTAAGAGTAGTCTTACCGGTACCAGCAGGTCCATTA
ATAGTTACATGATGTTTCTTTTCTTTAATAGCCTTCATAACAATGTTAAAGGCATTTTTCTGGCCTTCGG
TCAAATCATCAAATGTCATCGTAAATTCCCTGCAATTGGTATACTAACAATACGCCCAGTATCTAAAATT
CGCTGATATAATCTTTGCGTGTCTACGTCAGGCTTAACATGTTTAACTTCTATTTTATTAAACCAAAATT
TACGTGGAGTCTCAACTAATCTTGGAATTCCCTTACCTAAAGCTAATCGATACTGCTCTTTAAGAGTGGT
AAATACTTTATCAGCAATCTTCCATTCAAAAAATACAGCAGGACGATGTTCATCAAGCGGAACTGGCGCT
GTAAATCCGTCTTTGTCTCGGTAAACTATCGCATATACATAAACCATATTATCCTCGGATAAGTTTAAAA
ATTGAACAATTTAGCGGATATCCTCTTTTCAGTTTAAGTTTATCAATAAAAGACAAATTTTGATACCGCT
CTACACCTTGAATAATTTTATCACACATATCATATTGCATTTCTGCTTCTGACAACTTTTTCACAATTTT
CCAATCCGAGCCTTTAAGAAGAACGTTCAATTTAACAACTTCAGCGCCTTCTGCTATGCGAGAACCATCA
ATACGTGCTTTAAGTGCTATAATTCTCAGCTTAATGTCAGAGGTCTGTTTTGATTTAGAAAGCTGAGAAA
TGTGTTCAATTCGATTTTCACGTTTTTTCTGTATAGCTTTAATTTGATTATAAGTCTTTTTGATTTTAGC
CCATTTCTTTTCATCTAAATTTAGTTTATGAACTTTTTTCGCAGATGAACGACCAATTCGCAAAGCAAAT
AAATCACGCTTTTCAATCAACTCTTCTAAAGTATAATCAGAACGAAATGTATTATACTTTTTCTTTACTG
CAATAACATTCCCTTTAATGTATCCAACGTTATTATCAAAACGTTCTAATGATAATTTCTCTCCTTCAAT
ACGATTATCAAAAGGTTCTCCCGAGTAAGCACAAACTTTTTGATCTAAAATGTTCTTAATGTAATTGAAG
TCTAAGTTAAAATCTTTAGAACGTCTTTTTGCAGATGCCTGAGTATGCTCTAAACGACGTTTAATTTTAC
GAATTTGGTTATTAGACAGCTTCATATTTTTCTCACATCTTACGGACGGTTAACTACTTATACTATAACA
TTTTTACTTTAACTTGTAAACAACTTTATGAAAAATGCTTTAAAACTTTCATGGTATAATGAATCTAAGT
CCTTCCATTATAGATTAAATCCTTCAAAATCAAGAGTATAGATAGTGTATGTTGAACACTTTTTATACTC
ATATCTATCTGCAATTCTAAATACACTTCCAGCTGGTATCATTACTTCTTGTTCATCTGAAACTAATTCC
ATATTACGATAACGATGACTATCCGGAAACTTAAAGTTTGGATTGTATTCTTTACAGCGTAGAGCTTTTA
TAGCATACTCCTGGAAATTGAATACCATAGGAGCTTTGAATTCAAAAATAACTTGTGTGTTATACTCTAA
ACCAGAAGCAAAATGTAGAGCTATATTTTTATCATATGAAGCTGATACGACTTTATCAAATGTAATAATA
TCAATTCCTTGATTTAATACTTGTTTAGTCTCAGCTGGAACACCTCTCCAAAGAGGTTTATCGTTTGGAA
CCAAACGAGATTTGATTATTTCATTTAACCAAGAATGGTCATCTGGTTTATTAGTAATACAATGAATTAA
AAGTTCAATTTCAGATAAATTAAACCCTTCAGAAAGTAATTCTTCACGAATAGAAGCACGCACCGATGCA
TCCATTGATTTTATTTTAAAATCTTTTAGTTGCATTACTGAGTATTTCATTCAACTACCTCAATATCATA
AACTTTAAATGTTCCAAATGAATCGTGTAATTTTTCTTTTGAAATAGAAGTTATTTTATACTTTCCAATT
GGAATCATCCATTCTTGTTCACGCACAATCATCATTAAGTTATCAGTACGCTCTGAATCTAATCCATCAG
TATCTTCATACGTGTACTTAAACTCAGTATTAGGAGAAGAAAGTATAATATCGCTGATATGGTCAGAATA
ATTAAAAGCTTTATCAGTTTTTAAACGAAGTATTGTTTCAGTGAAATATTCAGCATAAGAAAAAGAACAC
GCTGTATGCAAACTAGTAGTAAATGAATCTACCCTGTTCGTTGAAAACACTTCTCCAACTTGTAAATCTT
TAATGAGTTCTTTTGTCGATTTTGATATACCACGATATAATTGATAAGGCGATTTAGTTAAATGCTTTTT
AATGATTTCATTTAAATGCTTATGAAGAGCTTCATTCTTTTTGGCTTCCATACATTGCCAAAGAACAGAC
TGCTCAAAGTCAGTAAATTTTTCACAGACCTTTTTATACATATCATATTGAAAATCAACGCTTTCAGCTT
TTATAGATAACTGTTCAACATCTGCAAGATTAATAATCATGATAGCCTCCGTATACTTCAGAAGCTATCA
TATCATCGTTAGAAAGGAAAGTAAACAACTTTTTGAATTATTTTGCCCAGGGAGCCCAAGGCGGAGGGTC
AAGATGGTATGAAGCTAGTTCTTCTAGAAGAGCATCTGGGGCTTCAATTCCATAATTCTGTAATACTATA
CGGTACTCTTTCTTATAATCACTAGAATCATTCTGGTTATTCGTAGAATGATTATCTTCTAACATCTCAA
ATAAATCCATATTAATTCCTAGCGATAAAAACCAAATTTACGATTAGTTTCAATGATCTTTCTTTCTTCT
TCGGACATTCTCCAGCGTAGTCCAACATCAAAATGAGCCCAGACCATCCTAACAAATGCATTTATATCTT
TAATATCTTCAATAATGAATGTTTTACTTTTAGAAGGTTGACTCGCTAATTTAACTTTATCGTCTTCAAA
CATGTCAAAAAGACCATATTCATGAGCTCTTTTATAGCCTTTAATAGTTAAAGCTTCAGAAGAAGAAAAT
GGTGAATCTGTATTCTGCAAAATATCTTCAGTATGCTTTATAATTAGAATAATATTTTCTGGATATTTTC
TTTCTTTTATATCTTTAATTAAAAAATCCGGATTTTCTGCTAAAGGAATAATTAATGAGCAATTTTTATC
AAGTGTATTTACTGATTTACCTTCTTTAGACATAAATTCTATTGAATATAATTTTGCTACTTCAATCATG
TGATTTCCTTTTGCCTACTAATGGACCGTCAGGAATTTTATTTTCCTGGATATATTTCTCATTTTCTTCC
ATCATTTTACTGCCAATTTTAAGAAGCAAATCCATTGCTTCATTTGCTTTTGCTTTAGCTTCTTCTAACG
TCATATCTTTGTTCATGATTTATCACCATAGATGTCTCTCATCAATTTAAGCGCTGAGCGTTCTAGTTTC
TTTTCTTTCTCAGCACTAATCATTGATTTCATCCATTCTTCTGATTCATTCTGCATTTCTTTATTTGCTT
GTTCAACCCAACCGTCATCAATATACATTGAGTTTGGTCTATTGAACCATTCAAGCATCTTCTTCAGAAC
TTTCATTCGTTTTACCTAAAACAATAGTAGGAGCATCGTCAAATTTATGAATTTTTAGCAAATTTGGATT
TAAATTATTCCATAAAGAGGTAATAAAATATGATAGCGCACTTTCGTCCGTAATTATAAATTTATTTCCT
TTATCTATTTTCCAATCATATATTGAATCATATGAATAGAAGGATAACGGTTTATTATTATAATATGCTT
CAGCAACATCAATATAGTTAGATTTAGTAAATGCTTGAATTGCCATAAATGGAGAATTTTGTACAGTTTC
AATAATTCCGATCTTTTTAAGTTTTATTTCAACATCTTCTGGAATTGGCATTGAAATAAAATCTTCTACT
AGATACATATTATTGTCATATCTTTTATCAATCATTACTGCTACAGTAATTGGAACATCCTTGACAAACG
CCATACTAATACTATTGATAGACATTTCAAACAAAATTGCTTCCATAATTTTCCTCAATCACAAGATGTA
GATGAACAACTAGAATCACAAGAACTTCCACATGAATCACCTGCCCATACATGAACAGGAACATTAGTAT
CATATGAATCAGAACTAGACTGTGTATTCTGTGTGTTAGATGATGTAGTAGGTGTTGACCAGCGCCAAGG
ATTTTTATAATATTCTTGGGCTTCTTCATAAGTCATAGTAACTGCTTCTACTGTTCCATCTCCCATATAA
ACATATTCAACTACAGTTAAAGGAAGGTAGTCATTTGAAATAGGAACTACACCTTCCCCAGGAGTTGTAG
AGAAAAAATCCGTAAAGAAACTTTTAAACCAATTAAAGATAAACATTACAAAAAGCCTCTTTTGAATTCG
ACTTGCTTCTCACCATAATCATATCGAATCTCTACATTAAATTCGACAGAACCATCTGCGTACATCATAA
ATGAATGCACAACAACTTCTGTAGACCATGGTTGTAGTTCATATTTCTTCATTACATGTCGTGAAATGAT
AATATCTAAATCTTCATTTGGTTTAATCCAACGATTTAACATAGTACTCTCCTCTATAAGATAATTCTAT
TATACCATACTCATTTTGGAAAGTAAACCATTTAAATGAAAAAAGGACTCCCGAAGGAGTCCTTGAGTTA
TTAACCAGTTACTTTCCACAAATCTTCATTTGCAGCAATCCATTCAGTACGTTGATTTTCTTCATATACT
GTAGAATATGCTGCTTTTTCTGAAGGGAATGTCTGGTAATGAGCGCCAGAAATTTTGTGAACGTCAGAAT
AAAGAGGGAAAGCTACAGAAATTTCCTTTCCTTCAATTTTCTTATTTCCATCTAATTTCTGCTCAAATGT
TTTGATATTAACATAACCGCGAGTACTAGCCATGTAATTCTCCTTTATTTAAATTACATGATTATTTATA
CATCTTCTTTTCTGAATAAGTAAATTAAATTCTTAAGAGCCGAACTTGTTACATCATATTTTCCTTTAAG
CGCCTTTACAACCGGGCCTGTTGCTGGTTTACCTAAAGAAACCCATAACTCGTGTATTTCGCTTTTAAGT
GGTTCATGCCAATGCGGTGCTTTTCTTTGCGCCCTTGAAGTTCCTTCTGAAATCTTTTTATTTCCGCCAT
TCGAATAAAACTTTTTCATTACTTCAGATTGCCGAGCTTTTCTTTCTGCCCTATTTTGGGCTATACGTTG
TGAATTCTTCATCCGAGTTTTTGTTTCAGGATTGTTTAATCTAAGTTTATGTTCTAATCGTTGTTGCTCA
GTCCATTTTCTTCCTTCTCCACCCTGACCACCAGGAGAAATATTAATGCAAGTATCTGGGTGTTTACGTT
TTAATGCAGATATTAGCTCACGTTCAACTTCATATGATTTTTCTCTAGAACCATGGCATTTTGACCATCG
TATTTTATAATTAAATCCATACTTACGATATATGTTCCATAGTATTTTACCTGAACCCGGATATTTATCA
TTATATGGATTTACAATAAATGATTCATGTTTCCCAGCGTACCAAAAGACGCCTTTCGGCGTCCTAACTT
TTACTATATATGTTCTATAAAATTTTTGTTTAATATCCATTATCTTGACGTTCAAAATTATGTTTGTTCT
TCAGATAATAAAGTTTAAAGATTTCTTCCGCATTCATTCCAAGGCCAACAAACATATTTAATACGAAATG
AAATATATCCACAAGCTCAAATTTAATTTCGAGCTGGTCTTCGGGGGACATTTCATCAATGCGTTTTTCT
TGCGCTTCAATATAACGTGCTTTCCATTTTTTCCATACAGCAGAAGCTTCTTTTTCACCACGTGACATTT
CACCAAGAGAAGTCAGAAGTTCGCGGAATTCATCATCAATACAGTCTTTTTGTTCACGCATCCAAGAAAC
AACATCACCGGCAGTTTCTAATTTATCTGGATGATAGCAGTATTCGCGGACATTAGCCAAACGAATCTGT
AAAAACCGCTGCATATCAAGCATAACTTGCAGCGGATCTTTTTCATCACCGAGAATATCCCAGTATTCAT
TTTGAGCTTTATCAACACCTTCGATCAAATGAGCACATTCATTAAAGTGAGCCATTAGTTTTCCTTTCAA
TTCATTAATAAGTTAAATAATTATATCATTTGAGTATGTAAGCAATTAATTAAAAATATATACTTCATCA
GTTCCATTCTTTTCTTTGGAATGATATATGTTAAAGACGTATTTTTTATTAAGATGCTTTACATTATATT
TTTTAGACCATTCTTTAAGAAGAGTGTTTTCCTTTCCGTGGTGTTCTAAAACATTCGACTGCCCAAATTT
TATTCCTCTATCATTTAAAGAATCTAAAAGATTTAAAAGGTCTTTTTCTTCATCTTCTGACCAAAATTTA
TTATAATCAGCAACTGTTATGAGATACGGAGGATCTACATATACAAAATCGCCGTCTAAAATTTTAACAT
CTTTAAAATGCAATGAACTAAAGATTATTTTATCACAATTTTGTTTAAAGTGATTATATTGTTTTTCACT
ATTTTTGTTTATAGTTCTTTTTCCAAACGGAGTAGTAAAATTTCCTTTATCGTTTATACGAATCATATTA
CTAAATCCGTGAAAATGAAGAACATAAAGTAAAAGAGGATCTCTAGTTTTATTATAATCTTCACGTAATT
TCAAAAACTCTTCTTTTGATGTTTTTGATAGTTTGTATTGCTTTATTACTTTTAAAACGTCATCCCATGA
TACATTAATAAGACGCTTATACATTTCAATAATTGGTTCTTGAATATCATTGGCCAATACAGGGCCATTA
ACATTCAAAGACACTGATAAACCTCCACAAAATAAATCCACGAATCTGTTATATTTTGGAAAGTGAGATT
TGAGTTCAGGTAATAATGATTGTTTATTACCTGTATACGCGATAGCTCCTAGCATTATATTCTCTCATTT
ATTGCAGCAAAAATGAATTATACAATTCTTCATCATATGTATTTGATAGTAATACTAACACGTTTTGCGA
TAAATATTAATTTAAAGGAGGATATATATGGTACAAAAATTAATGGCACTTGTTAATGCCATAAAAGGTA
ATAAGAAACGTATAGCTTTTACTATTTCTACTATGGTAGGAATTTTACTCTGGAACTTTATTTTATCACC
TGTTGCAATTGCACATGGTGTTAATATTCCAGTAGTTACTCTTGATACATTCGTAGATTTAGCATTTGCT
TTAGTTGGGTTAATTTAAATCTTAGCATATTTAGATAGCCGCATTTTAGCCATTAACCCCTGGGCAATAT
TATTTTTCATATATTCCATAATTTGTTCAGGGGTTGCACCTTCCTTTCTAATCATATCATTAACATCTTT
TGATTTCCAGGGAGATTTATCCCAAAACATAACCCTTTCTCCTGCATCAACTAATTTAGTCATTCGTTTA
ATAGTGTCAGGGTGACGAGGTTCATTATCTAAGACCCACACACGTCTATCTTTAAATGGAACAACTTCTA
GGTCTAATTGACCGCCCGTAATAGCTATACCATTTTCAATAAAAAGTGAATCTATAGGTCCTTCTAGAAC
ATATACATCACCATCTTTAACTCGTTCGACTCCATAGATTTTTGTTGCCTCAGGATAAGCTTCGATGGTG
ATATATTTTTGAGGAGCATCTTTCTTTAATGCACGTCCTTGAAAAGACTCAGCTTTTCCATTAGCATTAT
AAATTGGAATAACAAGACGAGGCTCAGAAATTTCCTTTTTGTATGTTCCCGGTGCTATGCTATTAACTAA
TTTAGGCCATTCGGTTGTAAACCAAAGATATTTCCATTTATCCTTTGGAATACAACGAGCTTTTACGTAT
TTTATAATTGGATGGTCTTCCGCCAGTTTATCTAATCTAACACATGACGGAAGAGATTTAATTATTTTCT
TCTCGGGTTGTTTAGGAAGTTCTTTAGGTTTTTCTATTGGACGACTTTTACCTTTTTCTTTTCTTATTTC
AAAGATATACTCACGATATAAATCGGGTTCAAACTCCTTTAAATATATTCCGATTGGTGCATGATAGTTA
CAGTTATAACAATGAATATTTCCTTCATTATTATCACCATAATACCATCCACGGGCTTTATTCTGGTCGG
TTTTTGAATCTCCACAAACAGGGCATCTAAACCGTAATTTAAAAGTTGAACTATTATTTACTTGTGTGAA
TTTAGGTAAATGAGCTAATGCACGGTATGCAAACTCATTATCAATCCAAGGTATTGATGACATTTTTACT
CTTCTTTTTCTTTAGATTCCTCTTTTTTCTTTTTAGGAATCTGTTCAGGACCTTTATTTACTACAGCGCC
TGATGTTGTTCCAATAGAGATATTTTCAGGATTACCACCTGAATCTCCAGCGACCATATCTTCTTTGATA
AATTCTTTAAATGTTTTCATATTAACCTCTATTCATAAAAGCATTAAAAATTTGGTCATCAATAGAAACA
TTTACTTTAGGCTGTTTTTCAGATGGCAATTCATATCCACATATTACAATTTTATGATCAATATCAAAAT
ACACAGAAGCAATATGATTAATGATATTTTCAGTAAAGTCTAAATCAACATCAATATCTTTTTGACCAAA
GCCCAAAGGATAAATAATGCGAGTAATTCGATTATCTTTAACAAAGATTCCACCGACATACTCTGTGCTG
CGTTTAAAGTCTACACGCCGACGAAATGAAAAATATTCAGGCTCTTTATGAGCTCGGCTCATAGGACACA
ACGAATAACTAGAATAAGAGATGTCAAATCCTACGCCTTCAATATGAACTAAATTGTCATGATTAAACCA
ATTATAATCATATGCCAAGTCCATTAGATTGTCATATGTGAAAAGCACCGGATTAACATCATTGGTCACA
AGCATATAATTAGCAACTGCTATAATTTCATTATTTTTAACGAATACAAACCGTGATTGATGCGAATGGC
CTGGACCTGCGTTTTCACGATTAATGATATAACACTGGGCACCTTTATATTTGTACGTGTCTTTACACTT
GTGCATTTGATAAAGCATTATTCACCTACCACTTCAGCGATGATATTTTTGTTATTAAAGTTTTTATCGC
AATACAGAACATAATTATACTGCATTACACCACCAGACTTAAGCTGTTTTTGCACTTCAGCTTTCATTTC
AGGACGATCACGCTTAACGATATTCATAATATCTGCTTCAATTTGAGTTTCAACCTCAGTCTGATCCGCA
GTCATAGACCATTCGCACAAATCTTTATCATAACCTGCCATAGCAGGCTGAGCAGCACAAGAAGCTAAAG
CAAAAATTGTAGCAAAGATGAATTTTTTCATGATAATCTCCTCAGTAGTTTATGTTTATATAGTATCTCA
ATTTCCAACAAAAGTAAACAGTTATTTTAAAATTTCTGCGTAATCACATGTTACAAACTGTTTCTCTAAC
TTGACGATTTTACGAAAGTATCTTTTGCATTGGCGAATCTGCCTCTTCGTAGGGCGAACAGCAAACTTAA
TAAATTCCACTCGACCAAATGGAGGGCTTTCTTCTGCTGGAATATCTAACACCAATTCCCACGTATCTGC
AATAAGTGCTTTGAATTGCGTATTTTTCCTGACGTTATACGGAGTAGGTTTAAATAAAACAATATGCATA
TTATCCTCGGCAATCCACTTCACATACTTTCTTGTCATCAATGAAAGCTTTAACTAATGCTTTATTAACT
TCAGCATATTGAGTAGTAGCCCATTGAACGTCATCTTTCATCATTGTGATTTCTTTAGTAAACATGCTTT
CATTCTTAAACCACCCCATAAAAACTACCTTTACCAATTCCATAACAATCTCCTCATTTAACCGACAAGA
CTACTATACCATAGTCTTGTCAGCTTGTAAACTAAAATTTTAATTCATTCGCCAAAGCATCTAACTGAGC
TCGAGTCGATTCATTTCTTTGATAGCGATTCTGCTCAGCCTGAATCTGTTGTGAACCTGCTACTTCGTTC
ACTTCAGTTGGAGTAGAATCTTGTTCAATTTCTACCCATTTTTGATTTCCTTTTTGAACACCCATCAAAA
ACTTATTCCACTTATTCTTATCACCATATCGTGATTTGATTTGCTTAATGAGTTGTTGTTCAGCAGCTGC
TAGCTCCTCGGTTTCAATGACCGCAAGCATAAAATCGGCTGTTGCTGGAAGACCGGCAGATTCTGCAATA
TCGCTCATGTTAACATCGGAAGAGTCCCAAGCTTGTTTACCAACCTGTGCTGCAGTCCAAAGAACAGTTT
CGGTTTCAACAGCCAGAGCACGTAATTCCTCTGCAATAGCTTTAACAGTTGTGTAACTATTTTCTGAATA
AACTCTAATGCGGCAAGATTTACAAATACCTAGATAGTCGACAATAATGATTGTTGGAACAAAATTCTTC
TTGAGCTTCAATTCGTTTAAAAGTGATCGAAATGTATTAGCGTCTGCTCCACCAGTAGGATACTGTTTAA
CGATTAAACGACCAAGAGTAGATTTCTCACGCCATTTTTCCATTTTTCCTTTATACTCAGCGTAAGAAAT
ATGCCCATCATCAATGTCATCAAGAGAAACATCAAGCATATTAGCGTCAATACGTTTAGCACAGACTTCT
TCTGCCATTTCCATGGAAATGTAAAGAACATTATGTCCGAGCTGTAAATAATCTGCCGCTAATGAACACA
ATCCTAATGATTTACCAACGTTAACGCCAGCCATTAAAACGTTCAGTGTTCCAGTTTCAGCTCCGCCTTT
CGTAATTTTGTTCAGAATTCTGAGTTTAAATGGAACCTTACGAGCTTTATTCATATAAGATAGCCAACGT
GCTTCGTAGTCATCCATCCAATCATGACCAACGTAACTATCAAATGAAATTGATAATGCCTGGCGCATGA
TGTCAGGAATAGCACCAACATCCGGCATTTTCTTATTTCGTTTTTCCGGAGGAAGCTCAGCATTAGTTTG
AATTTCGATTATTTTAGACGTAGCATTAAACATCGCCCTTTGCTGAACATATTTTTCTGTTTCTTTTACT
AACCAGCTGTGGTCTTCCGGAGAATCAGCCAGTTTTGAAATAAGTGTTTTTACACCAGAATATTCTGTTT
CAGTAAATGAACTATTTTCTAATGCAACATTTAACGCATTAATAGATGGAACGCTATGGTACTCATTAAC
ATGAGATTTAATTAATTTGAATGTATTTTTAGCTGGACCACTTTCAAAATATTCTGAATCCATATATGGC
CAAACTTTTGAAAAATAAGCTTGATCAAATATGAGATGAGAAAGAATAATTTCTACCACACTTACTCCTT
AAAAGAATTTAAATTTTTTCTTTGACCTTTTATTAAATGCATCTTGCAGTTGCATTGTAATACATTTTTC
TACATGAGGAGCTAACTCAGCTTTTCTTTCTTGGTCAAGAACAGCAAAGTCCATTACAACCTTTCCATCA
ACCCAATCCAGTTTAGTTACATACACTATATGCGTAGAACCATCTTCTAGTTTAATGACAATCTCCTGGA
TAACATTTTCCATAGCAGATTTAATTATCTTAAGAGACTCATTAAAAAGACGTTCTTTTCTTTCTTCTTC
CCCCTCCGAAGAGGGGGATTCATCGATAATTTCTAGATCTAAATCTAAATCATCTTTATTCATTAAATTC
TTCCATATCACTTAGCTGTTCGAGGTCAGTTTCTAAATCAGCAGCTGATTTACTTTTACTTTCTGGAGAT
TTAAATTTTTCAACCTTTGAGTTAATCAATTCATCAACTTCAGCTTCAACAATTTCATTACTATCAATAG
CACCTAACTGATAAGCACGTTTAATAGCATCTCGGAATGGTTGATGCTTAAATAAAGGACCCCAGAATGT
AGTGCAGTTGGTATCTTTTGCACGCCAAGATTTTTCTTCGCGAATCATCTCGCCAGTTTCTTCGTCAAGA
AATTCACGAGCATACCAGCCATTTTTAGGTTTTACCACGAATCCTAATTCTAGAGCCATATCTAACAATC
CAGAATAAGGATCGATACCACCGTCAAATTTAACATCAATAAAGAATTTACTTTTTTCTTTAACGGTACG
AGATTTTTCTACATTTAGAACAAATTGATACCCCTGAAGATCAGAACCATCTTTAATCTGGCGTTTACCG
ATAATGAATACGGTATCAGCCGAATACATCGGTCCAGTACCACCTCCCATAACTGTTTTACTAAACATTT
CTTGTGTTTCGTATGTATGGTTAATAGCAATACATGGAATATTTTTAGTACTAAAATAGGGAGTTACGAT
ACGAAATAAGCTTTTCATTGTTTTAGCTCTAGTCATATCACTAACAACTTTTTCATTTAAAGCATCTTCA
GTTTCTTTCTTAGAAGCTAAGTTACCAAGTGAATCGATAAAAACGACTACCTTTTCGCCGCGTTCAATTG
CATCCAATTGATTAACCATGTCAATACGTAATTGCTCAAGTGATTGAACCGGAGTATGAATTACTCGTTC
TGGATCGACTCCCATAGACCGCAAATAAGCAGGAGTAATACCAAATTCACTATCATAAAACAAACATACT
GCATCAGGATATTGACGCATGTAAGATGACACCATTGTTAATCCAAAGTTTGATTTAAATGATTTTGATG
GACCTGCCAAAATTAACAGACCAGATTGCATACCACCAGTAATTTCACCAGAAAGTGCAATATTCATCAT
AGGAATTTTTGTTCGAACTACATCTTTTTCATTAAAGAATTTAGATGCTGTTAATTCTGCAGTCAATTTA
GAAGTAGAAGCTTTAATCAAACGAGATTTTAAATCAGACATATAATACCTTATAGTAGTGTTCTTGTTCC
ACGAAATACTTCGAGCATTCTTGCATAAGATTTATTTGGAAATCCAGCTTCAATTGCTAATTTTTTAAGC
TTAATAGCACCGGATTTTCCAGAGTTTTCCCATATTTCTTTAATCTTTTCAATGTTATCCCACATTATTG
GGTCACGTTTATGTGATGGTTTATTTCTATTATAACCATATGGATTATTAAGCAAAGCTTCTTTTCGTTT
TGCTTTAGTTTCTTCTGACTGCTTTTTGCCTAGCTGGGCTTTCCGGCAAACATCACTAAATCCAAGATGT
TTTGGTTTTCCTTTTTGAGCTTTTGAAATTTTTTCTTTGGTTTCTGATGAAACTCTATAACCAATTCTTC
TACCACCCTCTCCACCAATTTTTAAATTATAAGTCATAGGATCATTTACCACATCTATTGTTACTAATTC
TCTTTCAGCATCACGGGCTGATTTAAAATCTTTATAAAACCCAAGAATGCTTAAATTAAAATTTTTCTTA
CCATACTTTTTCTTGGCTTGTGCTAATAAAGTTCCTGATCCCATATAACCATCATTTAAATCATCGGTTG
AATGAGTTCCATAGTAAATTTTATTATTAACTAAATTAGTTATAACATAAGTATAATTATATTTCTTTTC
TTTATGTCTTTTCATGTCATTAATCAACTGCTATTCGATGAACTTCTCTCTTTTCTAATCAATATAACAA
AAGAAGTCCCAAAAAGCAAACAGACCTAAACCGATAATAAGCAATAAAGGTCCTAACATTTATTCCACCG
GTTAAAGATAAATAACTTTCTAATAATAGTTCATAATTTTTATAAATCAATAGCTTTTTTGAACGCATCT
TGCCATTCGGCTTTCTTTGCACGGGTTTTATTTAAAATATCATGTTGAATAGAAAGCATCTCTTTACGCA
AAACATCACTGTGTTTTAACTCATTGACTCTATCAATGAGTTCAGCACGATTATTTACATAAAAACGAGC
ATCATTAATAATTCGATGTTTGGTATCAAATTCTTCGTCAATTAGCATCACTGCATCAGATGCCATTGTT
TCCCAGACGCGTAAGGTAATAAAGTTGTCATTATAATTCTTGTCACCAATAATTAATGCAGCAATAGCTT
GACTATTCTTTTCAGATACCATGTTCATAGGAATTTTTCCAGTGAACACCGGAGCTTTGGTCCAAGGATA
TTTAGGATTTTTAAACTGTTTTTCTCGTGCATTGCCAAAAAACTCAATATTTAAACCGGTGTCAAATAAG
AATTCTACCATCTTGGATTCGCGTTGACCGGACCGAAATGAACCGCCATAAATAACATCCAAAGTTTTCT
TGGTAGGCTTAGATAATTGAAAATCGTTCATATGAATTTTATATTGTTCAATAGGAAAATATTCAAATTC
AATAACATTATCAACTTTCTTATGCGCAGCCTTAGCAATGTCTAAATTTATACCTTGGGAAATCACTTTA
ATTGGTGATTTAATTAATAGCTCTTCTTCAGTGTACAAATATGCCCATGGTCTATTTTTAACATTTGGCC
AAGACTGCGAAAACGGCAAACGTATATCTGTAAATAAATAATAAATTTTACTTTTGTATTTTGCCATAAA
TTTTTGCGCAGATAAAATTGCTAAATTAGGTTTACCGCCAAAAAAGTTAATAGAAGAATTAACAACTATC
AAACGGTCATAATCATTAACATCTACTTCATCAAAAGATTTAGTGTAAACACCATTTTTAAGAGAAATAA
TGTCGACATTAAGACCCATTTCAGAAATAACTTTAAAAAGATAAATAGTTTCAGAAGATGGAACAGTTTT
AAAATTAATAACATTATTACCCATATTAATTATAGCAATTTTCATATTATTCCTTTTATGTTAAACGATT
AAGCGTATTTTCCTACATAATCTTTTTTCGAAATATGTGTTTCGCCAGTTTTCCACCAATGATCAACCAA
ATAAAAATGACGAGAATACACATGTAGGCTTCCAACATTCCATATAATGGAACCTGCTTTATACTGGCGA
GTTGAATCACCTGCATTCAAATCAGATACTAATTTATCTAATACGTATTTTTGCCATGCATAATCATTAC
GGAATCCGAAGACCACGTCATTTGAGCGCATGTTAACAACCGCATTGATTTTCTTGTCACGAATCAGGTA
TTGTACTGTATTCGTGCACATGAAATCTGACATACCATCTTTATTATAGTCAAACTGCATAGATGGACGA
GTATAAATCATGATACCACGTCGAGAATCAGGATTTTGACCAAGTTCAGCTAAACACATGTCATACTGAG
CATAGTTATCTTCTGACCAGATAGCCCAACCATAATTCGAGTTAATTTCACCTTTAGAAGATGCTACTTG
TTGCCAAATCTTCGGTGTTTCACCCGGAATATCTTTAACGAACAAGCTTTTAGATTTATACCATTCAAGT
TCACGCTGAATGTATTCATCATTAAGAGCGCCAAAAATAAACGGTTCATCTGCTACAAATGATGCGCCAA
TAATTTCAATAGTTTTAACACCTGTTTTATCAACTACGAAATCTTTTTCTTTTAATGCAAGCCCCAAATG
AAGACGGATTTCTTCAACTGTCATAGAGTCACTAATCATTTAAACCTCAATTGATACATTCATATTTAAC
TTGTAACAGTAATAAACTCCAACCTAAAATAATAGTTGGAATCATAAGAGGAACCGTTACACTATAGTAT
ATACTTATTATAATCATCAAGATTAAAAGCAATGCTGCTATAATTTTGCTTTTCATTCCTTCTCTCTGAT
GATAATTACCTGATTTGGCTGCGCAGACTTTTTAGTTTCACCTGCAATTGACCAAATAAATGTAATAAAC
CAACCAATAATTGACCAGTTAAACAGTAAAGATGCGAAAAAGATTCCTACTGTCGATTTTGACCCACGCA
TCAAGGCGATAAACCATGGAAGCATGTATATAATAATAGCCAACACGCCTGAAACTAAAACCATAAAAAT
TGAACCTGCTACTAAAGTTTCCATGTTTTCCTCACTTAGGTCAAATTTTTTACACATGAATTATAAGAAT
TCACTACATACTCCATCGGAGCGTTTTTACCTGTACGCCACTGGTAATTATTAGCCCAATTTGCCCAAAG
CTCAGCGCAGTAGTTTTCAATTTTTTCTTCGCGTGTAATTACATCTGAATTACGATATGCTTGAGCAGAT
TCATCTGGACGAATAGCTTCGTCAAAATTCGCCTGCATTTGTTCTACTGTCTGTTTTGGAGCTTCTTTAT
AACACTTGACATTAGGATTATAAAATTTGCTTGAACAGTTTACAATTTTTCCTACATCAGACTGATTTAC
TACCGGTCCTTGAGCTACACAACCAGCAAGACCTAATGCAATAACCAAAATAGCGATTTTCATTTCATTC
TCCAAATCCGTATCAGTAGTTGATAGTTGTATAGTACCATGGAAGAACAGTCTTGTAAACAGTTTTGTGA
AAAAATTTTTAGGGAATCCAAAGGGTCCAGAATCATCTCTTTTTCATAAGTATAGATTTATATTACTTGT
ATGAAAAAGGGACCTGGAGGTCCTAGATTTATTCTATCAGCCAAACAGGAAGTCTAACGAAGCTTTTTCT
TCATAGTCCATGCCAGCCGATTCACACATACCCGCAAGCGGTTTAACAAACGATTTTTGGAACAAAGTTG
AGTGGTCAATCCAAGATAGCACATCAGAACGAATTTCTTTTGGAAGTTCTGTACCCGATGGCCAAGCAAT
GCACTTGTCACCAAATGGATTTCCTTCACGTAATGGAAGAACCATTACTTTATTTCCATCCAAAATTGGA
GCTACACCTAAACCGCTAACAGCTCGACGATAAGTTAGCACACCACGAATATGGAACGGGCATTTAAATC
CTGGCCAACCTTTATCATCATATTTCGCTATATCGTTCGCAGTTTTTACTTCAGCAATAACTTTATAGTC
AAGTTGACGATATTCTTTCTCGAAGTTCTTGTAGTATTCTTGGACAGACTCTTCACCTTCCTGAAGAATA
CGACGAATACTTTCTTCGAGAGCTTCTTGCACTGCTTTTGGTGTTGAACTCTGCTGAGTTTCCATACCCA
TGATTTTTAGATGCGGTTCAGCAAATCGCTTATCTTCCATATCATAAACGTTCAGAGCATAACGCTTTTT
CGCTTTCCAAAATCCACCAACGCCCTTTGAACCAAGCGGAGGGCAAGAAATAGCTTCACGGTCCATATGC
ATCAGATGCTCGCGGTTATTCATATAATCACATAACTCACGATATGCAACATCAATCATAGGTTCCATCT
TTTTCTTACCGAACTGATTCATGAATTCAACCAAATCGTTCTGCTCTTTGAATCGGTCAAGACCAACTTT
TTCAATAACTTTATCTACGCAAACATATACCGAATCAGTATCACCTGCTGCAATGAAATCTTCATCATTA
GTTCCGCATACTTTATTCAGATATTCATTAATTTTACGAGCAATCCACTGAATACCGACTTGGCCGAAAA
TTGTGATAGCAGTAGCATTTCGCAAATCATAGTAACGGAAATGAATATTACCAAGAGCACCATAAAGACT
GTTAATGAGAATTTTACGGTTCAGCTGATTTGTATTAGCAAGTGTAGCTGCTTTTTCACATTCTTCAATC
AGACTATTGAGAACAGATTCGGTGTAATTCGATAGTTCATTTAAGAAATCATCACTGAACTTAACATATC
GTTCAACTTCTGGTTTAGTTGAACAAGACCCTGCGCCTTTCATAATAATCTTTTTAATAGCTTCGGCATT
CATTTCTTCAGCGAACATTTTCTTTTTCCAGTCTTTACGCTGGAAAAATACTTTAGCGATTTCCTTTGGA
ATGATACCTTCTTGATGTTTATCATACATCCATCCATTCGGAGAACAAGAATATTCATCACTCGGTTTAG
GAGCTGTTCCTGCGATATATTCATGAATTGGATGAACTTTAAACTGACCACGAATAGTTTCAGGACTAAT
GTTAACCTGGCGAATAATGCTCGGATACAGAGACGTCAAGTCAAAACTCATAATGTATCGACGTGCAATT
GGTTTAGGTTCAAACACAAATGCACCCGGAAAACTCTGTTTAACGTGCGAACCTTGTTGAGGAATAACCT
TATGTTCACCTTTCAATGAGTTAAAAATAATAGCATCCCAAGTTTTAATAGGACTCATTACACCAGAAAA
AGGCATTTTAGCGTAATAAGACATACTTAAAACTAGATCGATAAACCCACGAATTTTATCGATTGCTTGA
ACTGATTCTACGTCAATGATGTTATAACTAATGTATCGTTGATGATTAGTCTCACGAAGTTTATTAATAG
GACCGTCGTATGGTAATTTACCTTTTTTGGTTTCATGTTGAGCAACTGATTCCAAAGAGAATGACGGCAA
ATTAGTAAAAGCGAATTTCTTGTACAAATCTAAATAATCAAGAATAGATACGCCATCAATAGAATAAATT
TCTTTGCTACCGTACATATTTTGAATTAGTTTAGATTTTACCCGACCGATTGGAGAGAAACGTTTCATAC
TACGTTCACCCAGAATCATTTTAACACGATTCATGATATACGGAACGTCAAACCCCTCAATATTCCAACC
AGTAAAAATAGCAGGTCGTTTCTGTTCCCAAAGATTGATATATTCCATGAGCATATCACGCTCATTATCG
AATGGCATATAAATTACTCGGTCAAGAATTTCTTGAGGAACTTCATCACCACCTTCACAGTCAAGCTTAG
CAGCTAACTTTGCATCCCATTTTGATACTGAACCGTACATTGAATTCAAAAGGTCGAAAACATAAAAACG
ATCGTCAATTGAATCGTAATGAGTGATAGCATCAATTTCATATTCTGCTTTCATTGGGTCAGGAAATTTA
TCACCAGTAACCTCAATGTCACAGTTAGCTACACGAACAAATTTTCGGTCATAAACAATTTCTGAACCAT
ATGTATCACTTATATAAGCGAGTTTAAAATCGTTCATACCGAGAGCTTCGAGACCGATGTCTTCCATTCG
CTTCATCCAATCTCGAGCATCTTTCATTGATGGAAATTTTTGAGGAGCGCAGTTTTTACCATAGATGTCT
TTGTATTTTGACTCTTCCTTACAATGCCTAAACATAGTTGGAAGATATTCTACTTCACGGGTACGTTCCT
TTCCATTTTCATCAATATAACGTTCAACAATGTTATTTCCGACTGTTTCAATAGAGATATAAAATTCTTT
CATAGATATTCCTTAGTTTATAGCCCGAGTTATTAGGCTCTTGATATATTATACTCCAAATAAGGGGCCG
AAGCCCCTTGCTTAATTACCAATCGTATATTTAGGAACGAGCTTCCATTCATGTTTTTGTTTAAAAGAAA
TAACTCGGAAGTTATTAGTTAAATCTTTCATAAAAGTTCTTTGACCAGGAACGATTTCAATTAGTCCCCA
ATCTTCTAATAGCCATGCAATCGAATCACGACGAACTTCATCTTCTTCTGTCATTTCAACTTGACGACCA
TCCATACGAAGCATTTCTTTAAAATGAACGATATAGTATAGTCCTTTTTTCTGAAGAATATGACAGGACT
GATATAGAACTTTATCTTTATTATTAGCAATTCCCATACGAGTCAAAGTTTCTTTTACTTTCAGAAAATC
TTCAGGTTTTTTAAGAGTAATTTCAATCATTTTACCATTCCAATGCTAGTTTTTTGAGTTGTTTCTGTTC
TTTTACGTTCTTAGTCACTTCTTTCAAAAAATCATCCGTGACTAAACCTTTTAGTTCTTTTAATACTAAA
GGAAGTTTTCCATTTTTAGTAAGAATTGATTTATAGTTAATTGCATCATTTGTATTAACTTGATACCGCT
TAGCAAGTAACTTAATAATCAATACTTCGGTGGAATCTTCAACCAGTTTTGCCCATTTACCATATCTTTT
ACCACGAGGAACTGCAGCCATTAGATAATTAAAATGAGCTTCATCACTTAAGCCTGATCCAATTAAATTC
ATAGCATATACAGCTGGCATACACTCTGGAAATTGTGATAATGCATTTTCAACCATGAATTTTGAATAAT
CTTTTTGAGCAATAGAGCATTTAGTTTTATTATTAATAGCTCCAATTATTTCAAAAAATTCATTTTCTGC
TTTTTCTTTAAAAGAATCAGCAGCGGATTGGACAGCTGTCCAATCTTTTGAATACCAAGCAACTTGATGC
TCGTTTAATTGAATATCATCTTTAAATAAGCTCATATCACTTCCACTGCATTTCGCATGCTAATTGAATG
AAAAGATAAGCTAAATGCAATTCAGTATTAGCTGCAATACCATGATACTGATTATTTTCGCCGACAATTT
CGTACATACGAATAATACTTTGTGGAGTTACACGTGAATAGATTTCTTCGGCAAGTTTACCCACGAACCA
CGAATAATCAGCCGCATATTTTGGTGCTAAAGCTCTGAGTTGTTTAACATCTTTATTTTTGAGAGACTCA
AGAACATCATCAATAGCACCACGATCGTTAGTAACCAGTGATAAAATACCAGCATCCAAAACACCTTTAG
ACGAATAACTATCGAGCTCGCCAATAGTTTTACGAAAATCAGGAAAATTCTTTTTAACCAAAGCTGCTAC
AACTTTCATATCAGCTATAGCAATTCCTTCATGCTTGCAGATTTCAGTCAATCGACGAATCATCTGCTTC
ATCATTTCAATTTTATCTTCATCAGTTGGTTGACCGAATGTAATAACTCGGCAGCGTGACTGAAGCGGTT
TAATAATACCATCAATATTATTAGCAGTAATAATAATACTACAGTTTGAACTATAAGCTTCCATAAAGGA
ACGAAGATGTCGCTGAGACTCTGCTAACCCTGAACGGTCAAATTCATCAATAACGATTACTTTTTGACGA
CCATCAAATGAAGCGGCGCTGGCAAAATTAGTCAAAGGACCACGAACGAAATCAATTTTACAATCTGACC
CATTCACAAACATCATATCAGCATTTACATCATGACATAATGCTTTTGCTACAGTTGTTTTACCTGTTCC
TGGAGAAGGAGAATGAAGAATAATATGTGGAATCTTACCTTTACTTGTAATAGATTTAAAGGTTTCTTTA
TCAAAAGCGGGAAGAATACATTCATCGATAGTAGATGGACGATATTTCTGTTCAAGAATGTGTTCTTTTT
CATTTACAGTAATCATAATTTCCTCATTCAAGTTTTAGTGTAAATTATAAAGGCCGAAGCCCTCTATTAA
AAATCGTGGGTAGAATCAGCTTCAAGAGCTACCACATAATTCGCGTGTTCACCTTCAAATTTAGCAGCAC
CTTGTTTACCTTTTGCCCAAAGCAGAAGTTTATAATTTCCTGGTTGCATTTTCATATTTGCCATATTGAT
AATGAAATTAAATGTATTTTCACCATCATAATCACCAAGAGTCAAAGAATATTTAACACGGGTCAGAGCA
GAATCTTCTACTTTATTAAAACCGTTAATTACGATTTTACCTTCTTTTACCGTGATAGCAATTGTATCAA
TTTGCAGACCACGAGATACACGCAACAGCTGTTGAAGGTCTTCAGCTTTAATTTCAGTAACAGCAGATGC
TACCGGGAATGGAATTGGTTTATTAGGAGCAACTACTGTACTCGGATCGGCTGCTGGCCAAAAAATTGTT
GAGCGGGCATCAGCAATTTTAATATTTCCATCTTCTGACTGGGAAATTTCTGCATCATCATTAACTAAAG
ACAGAATACCGAGAAAACCGTTCAAATCGTAAATTGCTACATCAAAATCAATAACGTCAGAAATATTTGC
TTCCGCATAAGTTGTACCATTAACTGCGCGAGTCATAATAAATTGACCGGATTTAAGCATAATACCAGAG
TTAATAGTAGCGAAATTTTTAAGCAGAGCAGTAGTATCTTTAGACAGTTTCATGTAATTTCCTTCAATTC
AAATGAGATTTAATTTTATAACTAATTTAATAAAGCAATTAACGATTAAAATCAGCCGCAATTGTTTCCG
CAACAATTTGAGCAGCAACAATTAGACGTTCATCTGCATTACCGCAATAATCATCTTCAAGGCGTTCACC
ACATGAAGTCATAATAAATTTAGCACCGGCGTTTAGGGATTCTGTAGTATGTTTGCGCATTAGTTCAATC
CATTTATTACTTACTTCACGATCGATAGCTTCATAATACGCATGACGAGCAGGTGCAGATTTAATTTTGT
TCTGAATAACTTCCATTGCGTTATCAGAAAGAGACAAAACCCATGCTCGACGAATTTTATTTTGGTTTTG
TGGATTTGATTCAGAACGCACGTGTTTTGGCTGAATATCTTTTACATCAACAGTATAATTCACAGTAATT
TTAGTCATAATACACCTTTAGTCATAATAATCAGTAACAGTCCAAGCTTCATTTCTATTGGACATTATTT
TTGTATATTCTGCTTTAAATGCATTCCTAAGCATAGATTCAGTAACTATATGCTCTTCATTAGAAAAATT
ATTTCTCAGAATATATCGTTTTATTTCAGGAATAGTTAATAGATGCTGTCCAGTTGAATATTCCATGTTT
TTCCTCCATAGAGATTATACTCTAATAAATTAAAGCATAATCTCTTATAAATTAAACCATTACAGTAAAT
CGACCAACTTTCTTCATTTGAAGATGCTGACCATATTCTTGCGGGTCATGGTCTTTATGCGAAATTATAA
AAACGTTAGTGTTTTTCATTGAATTTATAATATTAGCTACACCTTTAATACCTTCGGCATCAAATGACCC
ATCAAACACTTCATCAAGAATTAATGTACTAATACTAACACCAGATACGATAGAAGCAATATCACGCCAA
GTAAATAAAAGAGCAATATCGATTCGTGCCTTTTCACCTTCACTAAATGAAGCATAACTAAAATCTTCAC
GACCACGGGATTTAATTGTCTCATTAAATTCTTCATCTAATGTAAACACATAATCCGCTTCCATTATTTT
AAGATAATGGTTAATCTGCTTATTAAATAATGGAATGTACTTTTTAATAATAGCACCTTTAATACCAGAA
TCTTTGAGCATATCAGTCAAAATTCCTCGGTGGTATTTTTCCATTACTAAATTAGTTTTTGTCTTAACAA
TTTTATCAAGTTCTTCTTGAAGCAGTGCTATTTCATCAGCATGGTCAATAAACTCAGAAGATGCTTTTTC
TATAGCCGCTTTAACTTTTTTAGCTTTATCTACTGCTGCGATCAGAGATTGCTTTTTATTGCGAATATCA
TTTGCCAACGACTGCTGGGTTTTAATATTATCTCGGTATTCATCAACAAGAACTTTTAAATTATCACGAT
GTGTTGAAAGCTGTTCAAACGAATGTGTGCATTCAGAAACTTTATCTTTAATTTTAGAAACAACTTTATC
ACCGGAACTCAATTGTGACAAACAGGTTGGACATAATCCACCTTCGTGATACATATTAATGACTTTATTA
TACGAGTCAATTTTTGATTTAATTAAAAATGCTTCTTGACCGATTTTATTAAATGCATCAGTCGGGTCTT
CGTCCAAAACAATATTAACTAATCTTTCGTTAGCTTCTTCTATTTCCGATTTTAGCGTTCTAGCTTCTTT
TGCCAAATCATCATACATATTTTGTAGACGAGTAAGGTTGTCACCCGTTAATTTTTTCTGGCGTTCAACA
TTATCATTATATATTTTAATTTGTTGGATAATACTATCTTTTTTAACATCAAGCACTTGGTTCTGCGAAT
TTAATTCACGTATTAGTGCTTTATTAAGCTTATCCATTTCAGCTAATGTTCCTACCTCAAGCAGGTCTTC
CACAAGCTTTCTTCGCGCAGGGGTCGACAAACCCATGAAAGGGGTATACCCTGCTGTACCAAGGACAACA
ATCTGCTTGAAACTGGCATATGACATTCCGATAAGCTGTTCAAATTCTGCTTGGAAATCTTTACTGCTGG
CAGATTCATTAAGACGTGTACCGTTAACGGTGATTTCGAAAACGTTTGGTTTTTGTCCTCTTTTGATATA
GTACTTTTTCTCATCATATTCCATCCACAGTTCAACTAAAAGTTCTTTCTTATTTGTGCTGTTTATTAAT
TGACCTTTCTTTACATCGCGAAATGGCTTACCAAAAAGCCCAAATGTGATGGCTTCTAGCATAGTAGACT
TACCACCGCCATTTCGTCCAGTAATAAGAGTTTTTTGAACCTTATCTAATTGAATGTCAATCCCATTTTG
ACCAACTGACATTATATTTTTATATTTTACTCTATTAAGTTTAAAATTCTTCACAAAAGATTCCTTTTAA
TGTATCTTTTAGACCATTCTATCATATCATCATAATCTAAAAAGTATTCATCAAATTCAGCCATGCAAAC
AACGCCTTGTGCTGTTTTTGATGTGATATAAATTATTCCAACATATCTAGAATCTTCTTCGGTATAATCA
ATATTTGCTATGAATTCATCATTAATGTCAAATGTCGAAAACTTCACAGTATGCATCCTTAATACAAGAT
ACAGCCATATCTCGTAATGATTTAGGTGTGTCATTATCTAAAATGTTGAAGTTAAAAGATACAGCCCAGT
CAGTGCAGACAGTAACCTTTTTAATACAATTATCTTCAACCTCTAACGGTTCAAACCAGTATTCAATAAT
TTCTTTATGACCAATATCATCTTTTACTTCACATTTAAAATGCTGACTCATCATAACATTTTTAAATTCA
TCAAAAGTCATTGTGTTGCCTCTACATATAGCTGATTTGCATATTGAATAAGTGCTTCACGGTCAGAATC
AGTGATGTCTGGAATTGCATTAATATACTCTTCCATTAATGTCTGAAGCGATTGAACTTCAACTTCTTCA
CTGTCATCTGACTCGACAGAGTTATCAATCTTTGACACAACTCGTAATGAATGCACAACTTTTTCTAGTT
CAGATTCGAACTTCGTCAGATTTTTGTCTACTTCAGTTACTATAACACGTACTGATAGATTTGTAAAATC
TTTATAGTCAATTTTTCCTTTAAATGGATAATGAATTCTACGATGCCAGGTAGTATTGTTTGGAATAAAT
TCCGTTCGTTCTGTTTCTGTATCAAACATCCAGAACCCACGAGGGTCATTCTCGTCACCTGCGGTTAGTG
TCCATGGTGTCCCAATATATCTGACGTTTGCAGCCTCAGAAATAGTATGGAAGTGACCAGACCACACTTC
TTTATAAGTCTTAAGGAAATCGGGTTCAAGACCATGAGATTTCATTCCTTTATAAAAATAAAATCCATTC
AGTTCCCAGTGACCAACACAAAAAGAAGCAGATGAAGTTTTGATATGCTCAAGAATTTCACCAGTATTTT
CTTCGCACATCCAAGGAATCAAATCAATCAAACACCCGTCAAAATCTACTGTAGTAGGCTTATCATACAC
TTTAACATTAGGATATTTAGCCAAAAGCTCAGTAGAAGCATTTGGATGCATTACATTTTTATAGTGGAGA
TCGTGATTTCCTACAATAGTGTGTAATGTAATTCCAGCATCATCAAGCGTTTGAACTATTTCACGGGCAA
ACTCCATAGTTTTATGTGTGATCGCTTTTCGCACATCAAAAATATCACCGTATTGAATCCAGGTAGTAAT
TCCATTTTTCTTAGAATATTCTATCGCTTGCTTAATTCCATCAATTTGAATACCGCGAATCCACTCATCA
TCAGCTTTAACGCCTAAATGCCAATCACCTAAATTTAAAATTTTCATATATCAAGAACCGTCATTGAAAT
GCAAAATAAAATTATTGAAATAAATCCATCTGGAGTGCTAAAGAACCCAATCCAACATGCTCTAGTGAAT
AGATAAAATGCAAGAAAAAGTATCACATATCCAAGAAATATCATTATATCAAACTCCGTATAAAGCTAAA
GGGCCGAAGCCCTTTATTTTGTAATAATGTCAAACTGTTCTTTAAAGCAGAAGCTTGAATCTTGATGCTG
ATACAAAAATTCATATGCTTTTTCTCGCTCACGGTCATAAAGAGCTCGGTCAGATGACAGTTCTTTAATA
CGTTCAAATGTTGATTCCATATCATTTTCATCAAACCAAATGATACCGCTATCATGCGAGGTCAAAGGAG
TATTATCAACACGGAATTTTAAATTTTCGCCAGTAGATTTCCAAAATACCGGAATTGTTCCACATGCACC
AAGCTCGAGATGAGTATATTCGAGTGAGCGTTGTAAGTATTTCTGGTTAAGTTTACTCAACTGATATCCA
AAGCCAGATTTACTCATTCGTTCAAGCATTTCACTATTAATATAACAATCTAGGATTTGTGCCGGTTGAT
TCGGCGCGAGATTCATTTTATCAATCTCACGATTACCGTAATATTCATACGGAATACCTTTTTCCTTAAT
TGCAATAAAAGCAGGGGAACGTTCCAGACCTTCCATTACAGTGGATTTACCAGCAGGTTTTAAGAATTTT
TCATGAAAATCAAACATCTGGTAAAAACCTTTCCATGTAGTCGTACGACCAATCCAACGGTTGATATTCA
TGTTAATTTCAGAAACATCTTTCCAATAAGTTGACCGAACCTTCACAATATCCATAGGAGGCTGAAAATT
ATATACTGTCGGTGCTTCTTCAATATCATCAAACAGAGAAACAGTTTCTGGATACCATTCTTTCATCAGA
ACTTTATTAAAATCACCATTATCAGAATGGCTAAAAATAACATCAGCTCGACGAACAGTTTCTTCTAATC
CCAAATTTCGACGCAAAGAAAGAACAGAATGATCATGCTGATAAACTACAACACGAATAGAAGGTTTAAT
ATTATCTAAAAGTTTTTTATAGTTATTAATCGTAGCTTCTTGAACGGAAGTAGCAGGAACAGAATTAATA
ATTAGAATATCACAATCATTTACTAGCTTAAGTGCTTTATCGTATTCTTTAGCTAAAATAACTGGAATTG
AAAATGATTTGTGGTCATGAGAACTTGTACGAGTAAATGATTTATCTTTAGCATAAACCAAAGTTACTTC
ATGACCATTTTTAATAAACCAATCACGTTGCTCGAGTGAGAATTTTGTTACACCACAACCTTCAAGACCT
CGAGCCATAAAAATGCAAATACGCATAGTTTTCCTCTTTTCATTTAATAAATCATGTAAATAATATTTTA
TTTTCTATAAAACGCTACGAATAGGCCCAAACATATCCATAAGCAATTTTGCTTTTTCCAGATATGCACT
TTTTAATATTAGACATGCATCCTTTAACGGATACAGCTGCGTCTTTAATTCTAGGAAATACTCGTAATAA
TTTTCCAGTAGTATCATATTGAAATACTGGCACATTTCTTTTCTGAGTTATCCCACGTTTAGATTTAGAC
ATTTTTTGTTTAGTTGCATTAGACATCCTAGAGGGCTTTCCTATGTTATCAGAATAATAATATTTCCATT
GAAATCCTCCAGCGGTTTTCCTTTTACCATCTACACATTGTTTAATTGAAGTTGAACAGCTATATGACAT
ATCTTCTGCAGCATCTGTAATACATCTATATTTGCGAATAAAATTTCCATTTAAATCATATTGATAAATT
GGTTTTCCAGCATTTCGTCTAGCGTTAGACATGTATTTTTTATTATCATCATCTTTCCAGAACTCTTTCA
TGCTTTCCGATATTGAAGAAGATACAGCTGTTTTAATCCATCCATACATTTTATTATTTAGTCTTGTTCC
GTCAGAACTATAACACATCATACGAATAGCTAAAGCCAATTTAGGAAGTCTATAAATTTTAAATAATAAT
AAATGCGCGGTAAAATGTTCTTCTGGTGTCAAAAGAACTAAATTAGTTTTATCATCTGTACCACCCATAC
ATCTAGGAATTATATGATGTGTTTCAGTATAGTATGTCAAAAGACTTTTATCATTGCCTCTGTTTAGTCC
TTTTTCGATCAGTAAATTATATATGTTTAAATAATTCATTTTAGTTTATTTTACCAAAAAATTTATAAAG
CAATATAGGAGCCGAAGCTCCTATCCACATAATACGCCATACAGAGGCTCGTTAGAACTTTTAAATTTTA
TGCGCTTATATGTTATAGTTCCTTCTGCTTTAGCTTTATCATGAGCCTCTTTAAAGCGTCTCATCATTTC
CTCTCTAGAGGAACGAATTTTATTATAATCTATTTCAGAAGTCGGATGTTCATCTTTCACAGTTGCCACC
ATTTTTTGACTTGATAAGAATCAACCCACACTTTCATATTAGGGTCTGCTCTTACAATAGGAGGATTAAC
TTCTTTGATTGAACTATCACGGTATTCTTTTTCAGAAATTTTCACGCAAAGATGACCATTCAAAGATTCA
GTAAATCCTGCATTAATTTTAAGACGCTTGAATTTTACGTGTGTAAGCATCAATCATATCCTCAATCTGC
GATCTAGTAGTCTTCCAAAGAATACTGATGAGTTCATCGTTATATGGCTGTTTTAGAATATCCCGACTTT
TCTTGATAGCATATTCGTATTGAGCAAAATTATTATTTTCAGCTGCGATCTGAGCGTGCTTATAAAGACG
ATTCAGTTCGCGTTTGTTTTTAGACAATAACTTATTTGCTTTTCTTTCTGCTTCAAGACGGTTCTTTTCT
TCAATAGAAGAAATAAGCTTTTCCACTTCATCATTAATTTCGGGTTTATCAGTCATATTATTTCTCTAAT
ATAAAATAAAAATCATCATCTGTTAAATGATACCGATAGTTTAATTCTACACCATTAGATTTAAAAGCGG
TATCATACGGATTTTCTGGATCAATATCAATGTCAAGAGCTAAAACTTCCCTGAGATACATTTTAAGTAA
ATAGGGAATAGCTTCAACTTCAGGTATTTCTTCCAAGAATCCGGAGAGGTTAATCGTTAGCCTCATATAA
AAAATCCAAACTAGGAGAATCATCTACAACACTTTTCTTTTCAGCCCCCGGTGTTCTATAGGTTGATTCT
TCGTAATGCGTCATTTTATCATAGATGTCTTGAATAAAAGTTTCATCTACTAACGCAACCATATCGTCGT
CACGGCTGTCATAGACATTGTGAACGAAGTAACTATATTTCTTTGCAACTTCCTTACGTTCTTTTTTAAT
ACGTTGGACGAATGCATTAAAACAAGCTTGAGTTATATACGCATGTGGGTTTTTATATTTCGTTTCATCA
AAATTGTGAAGCCCCTTAATAGAAGCTTCTATACCATCTGCAATCATTTCTTGTTTCCAAGACTGGGTGT
ATCCTGAAAAGTTGAAACGTTTAGATAAGCCTTCTGCAATAAGCATAATGGCTAATCCGATAGTATCATT
CTGACGAACTACTTTATTTGGGTCTTTATTATTTGCTAATTCTGTTTTCCAATCAATAATAGCTTGTAAA
AGCTCTTTATTGTTTACGTAATTATATTTAGGCTTAGTTTCTGACATTTTCACCTCTTAGCTCAATTCAT
AGATCTATTATATCATAATATTTGAAGACCTATCTTAAAGCATAGAGGATGAATCAATTTCAAGCACTTC
ATCAGATTAGCCGCTCCAAGAGCTGCATCTAGTGAATCAAATTGGTCAACATATTCAATTAATTCGCCGT
AATTAGCGTATAACCACCATTGGCTAAATTCATACTCAAGGATGAATCCATTTCCTTCAATTTGAGTTAA
ACCAATGCCATTTGTATTTACTTCATACCCAGCGAGACGTAAATCGTTAATAAGAGCTTCGTTCATAATT
ATACCTTAGTAATTTTCAGGTCTGCAAATTTTTTCTTGCGTTGATTTTTCATGCGACGAATAGTTTTATC
GGAAATTTCATGCTTTTGATAAGCTTTAGATTCTACACCAAAAGCTTTAACATCAAATTCTGACAAGATA
TATTGAACCAACAATTCACGGACAGTATTGCGTCCAATCTTCTGATCATTCTGTTTCATCGTTTGATGAA
GCTCTTTTTCCCATTTATCCAAAATTTGAGGAGTTACAATATCGCCTTTTTCTAGCAAAGAAACTACTTT
ATCATATGCGTAAGAATTGATGGCGTTTTTAATTTGAATAGTCATACATTATCCTCAATTACGTTAAAAT
TTTATTATCCAAAAAGGCCGAAGCCCTTAGGCTAAACTTTTTGGCACCCTTCCAGCCTTCGTACATCATT
GCGACTGACAATGACAAAGCTCCTTCACATGCTGCATACTTATTATTCCAGAACCAATTTAGAAAAACTT
CATCCTCAATACCGTTGTGTTTCATGTTCTGGAAAAATTTGGCGCGTTCTTCAGCAATTCGCTGCGATAA
TTTAGATTCAGGATTCATTTAAATTTCCCAATTGCCATTTTCATCAATAAATTTAATCCAGTCATTTACT
GACCACTTGGTCGTATCGCCTTTTGGAGTAACATTTAAAGTGTATAGCCCTTGCTTAAAAAGCATGCGTT
TGATATTCATATTTTCCTCAGCTGTAACGATAACACTCGTTTGATTTACGTTTAGCAACTCGTTGAGAAG
TATTATAATCAAAATCATCATCAATGTAAACTGATTTTTTCAACTTTCTTACTTCACCGCGTAATTGACG
ATTTAACTCATCTTTAACTTCTGAATCAATACCTTTCATTCTACGCCATTTATCTGAGCGAAAAATGTTT
TCAACCATATCTTTATGACTTACCCCATCAGGAGCTTTACGCTTTCCGAAATAGTCATAATCACGCACTT
TTAAGTCTTTACGACGATACGTTTTACCCATGGAGTTTAATTTCCTTAGCAACTGAACTAAATACAGCAC
GATCACAAATCATACGTTTATGTAACTTGAGTATAAGATAGTAAACATCAAAACCATTTACATAAGTAAC
ACGAACAACATTACCATTCACGAGATAATACTGTCCCTTTTTAATCTCTTTATCAACCACAACCATATCA
ATTCCTCAAAGGTAATTCATATGTTAATAATACCACGGTTTGAACTTGTTGTAAACAACTTTGTGAAAAA
TATTTTAGGGAATGATAAGAAAGGAACGATAGCTTAGAATGGTAATATACAGAATGTGAGAAAGAAAGGC
CCAGAGGGCCCGTCTTAATCTTCTATGATATCTCTATCATATCCAAGTGAAATGAGAGTTTCTTTGAAGT
GTTTAATGTTCTTTTGTCTAGAATCATTAATGAAAATGACTGGATAACGAATGTTAAGAGATGTGAATCC
AGCGCGTTTAGCAAGAGATACAATCAGCGGACGATCATACTCAATCTTACCATTATTTGTAAGAACTTTA
TAGAAAGTAAAAGGAGCATTGAGCTCCTTTAGAAGTTTTGTAACTGATTGACATCCAGGACAACGACCTA
CTTCATCTGGAATTCCATAGACTTCAATCTTATTTTGTTTCACAACTATTCCTTACTAAGAGCAGCATTC
AGCTTGTTAGTAATTTTATCCAGACGCTCATTGAATTCACTAGAAGATAAGCCCTTTTCTGGAGAAATCA
AACTAATCACGAAAAATATAGCAATAAAAGGAATAAGGAAAATAGCTCCAACTGCCATAAACAGAAAGAA
TGTTACAGTTGTAAGAAAATCAGCTAAACCTTTACGAAATTTATACATTTACATTTACCTTTAATTGATT
AACCAAGCATTGATAAGCACTAAACTATACTGCGAATAAAATTCTGGACCAAAATGAAAATCATATCATT
TATAGTATCCATAATGTAATTCAATTTAATCATGTTTCCACACCCCATCGGTATTTGACCAAAGTCGCTG
ATTATCTGATCCTCGCCACAGCTTTTTGGTCGGAAGATTTTTCTCATACTTCCCATCAATAATAACATCA
ACATATTTAAGCATTTCTAGTTGTTTAATATCTTCAAACTTATATCCTGTCCACAACCAGATATCTTTCT
CCGGAAATCTTGCTTTAACCCAAGAAACTAAATTTGAAATCTCTTCTCGGTTCTGTGGATAAAGTGGGTC
ACCGCCGGTTAAGGTAAGGCCTTGGATATACGATTTGCTTAAATGGGACGCAAGTTCTTTAACGGTATTC
ATAGTGAATAACTGTCCGTTACGAGCATTCCAAGTACTACGATTATAACAACCTTCGCATTTATGCAAAC
ATCCAGTGACGAAGAGAACGACCCTACATCCAGGGCCGTTAACGAAATCGCATGGATAAATTCTATCATA
ATTCATCTTTATATTTCCAAGTATATCCCTTATGAATAGATTGAATTCCTTTGCAACATTTATAAACAGC
AGAATGAAAAAATCCTGCATTTCTTATTTCAGTTGCTCCAGTTAGTTCTATTGTATTTCCGTCTGGTGAA
TAGCCAATAACCGTTTTGGTGTTAAAGCGATTTCTAGAACTATTTTTGATATGCTCTTTATGATTAGTAG
ACAAAGTTCTTCCTGTTAGCCCATCAGATATCCTTTTTCCAAAATCATCAGGAAGAGTTACTTTAGACCT
AGCTATGCTCATTAGCTTCTTAGTTTTATCGCTTCTTTTTGCGCCACGCTGATTTTCAAATTTCTTAGCT
TTTGCATACGCGTATTGTGAAGAAGTAACTTTTCTATGCTTACTATTACTCATTATCCAATATGCATCAT
ACATCTTTCCACCATATATTTTAGCCAATAAATGGTGAGCAGTATAGTGGGCCTTATAAGTTAAAAATAC
TAAGTTGTCTAAATCATCTGAACCACCCATACTTCTTGGAATTATATGATGAAGTTCATACCCGGCTTTA
GTTTGACGGGGCTTAGATGGGTGTTCAGCAGAATTAACTAGATTTGAATAGATTCTGTCATAATTCATTG
GTGCTTAACCCTATGCATGATTTCTTTATTTTTACCGAGATTAAATCCGCGTTCGTTCGGATTTCCCAAA
TAACCACATGTTCTTCTTATGGTATTCATCTTTTTAGGATCAGTTTCTCCACAAATAGAACAAACAAATC
CGTTTTCAGTAGGAGTCATTTCATGGGTACTTCCACATGTAAAACATTTATCTACTGGCATATTAACACC
AAAATAATCTAAATGCTGTGCAGCATAATCCCACACGGCCTCAAGACCTTTTAAGTTATTTTTCATATCA
GGAAGTTCAACATAAGAAATGTGACCACCTGTCGCAATGAAATGATATGGCGCTTCACGAGAAATCTTTT
CAAACGGAGTAATATTTTCTTCTACTGAAACATGGAAACTGTTAGTGTACCAGCCTTTATCGGTAACATC
TTTTACGCTTCCATATTTTTCTGTATCGAGTTTACAGAAGCGATAACACAGGTTTTCAGCAGGAGTCGAA
TATAAACTAAAAGCAAATCCGGTTCTTTCAGTCCACTGTTTAAGATGAGCATTCATTTTAGTTAAAATTT
CTCGTCCAATATCACGACCGACAAGAATATTCAATTCGTGAATACCAATGTATCCTAAAGACACTGAACT
TCTACCGTTTTTAAATAACTCAATTATGTCGTCATCAGGTTTAAGACGAACCCCGAATGCACCTTCTTGG
TAAAGAATAGGAGCAACAGTAGCTTTAACTCCTTTTAAGGAACTAATTCTACACATCAAAGCTTCAAAAC
ATAAATCCATTCGTTCATTAAATAGCTCAACAAATTTCTGTTCATTGAACTGTGTTCCAATATAAGAATC
TAACGCGATGCGAGGAAGATTCAGTGTTACAACACCAAGATTATTGCGTCCATCAAGAATTTCATTGCCA
GTCGAATCTTTCCATACGCTCAAGAAACTACGGCAACCCATCGGAGAAACAGGAACAGATGAACCAGTGA
TAGCTTTATTGTTCTTAGCTGAAATAATATCAGGATACATCCTTTTGCTTGCGCACTCTAGAGCAAGCTG
TTTAATATCATAGTTCGGATCGTCTTTATAAAGATTAACACCTTCTTCAACGAACATAACAAGCTTAGGG
AAAATAGGAGTTATCCCATCACGACCAAGACCTTTAATACGATTTTTCAGAATTGCTTTCTGAATCATTC
GTTCAGTCCAGTCAGTTCCCGTACCAAATGTAATTGTTACAAAAGGAGTCTGTCCGTTTGAACTGAATAA
CGTGTTCACTTCATCAATGTGTTCAGTAGAGTTCGCTACTTCTCTACCCGTTTATATGAAACAATGTAAT
TTGGATAATTGTCATCTAAACACAAATCTTTAATACGACTTGGGTGGAGTTTTAAATCTTTAGCAGCATC
CACAAATGATTTATAGATATTGTCATTTATTTTAACATATTCTGGGACGGGATGAATTGTTATTTTTATA
TCTATAACATTTGGATGATTACTAACCTGTTCTTCAGAGCATTTAAGAAATTTTGCAGCTGATTTAAAAC
TTCTAAATTTATTTCCGGATTTTAAAGCTATAGAAACAGTCTTTTTAGCCGTTCTACTACCAATATTATT
TTTAACATGAGCTTCACTTCTACTATTATTTTTATAATGCTCAATCAATTTCTCTCGTATCTTATCTTTA
TGTTTTAAAGATAAGATTTTACCTTTATGGGCATTACTAAGTTTTTGCTTATGTTCTTCTGAATCCGGAT
ATTTGTTAAATTTATATCCACCTATAGATTTATTAAGAATAAATTCGTTATTAAAATATTTCCTAATAAG
CATTTCTTCATGTTTAAGGGCCGATTCATAAGAATCAAAAACTTGAAGAATTATCCACTTAGCTTTATAA
TCTTTAAGCTTTTCTTTAACAAGCTTAGATGACGAATTGTATTCTTTCCAATTTGTATCTTTACCATATA
TAGTTTTGAATTTTTTAAAACCTATATAAAAAGACTTATCAGGAAATCTTACCATATAGGTAAATGCTAC
AGAATTGGCAATTTTTAAGCTTTTTCTTAATTTCCATTTCATCGTTTCACCTCGTATTCATATTTATACG
AGGATAAACAGCTGCATGTCACCATGCAGTTCAGACTATATCTTCAACTCTTAGAGTTGTCTGCCGTTTC
GGGTCGCTTGACCCTACTCCCTTACATTCATCAGGGATAGTCGTTGGGCATTTACAGCTACTGCTGATTT
AGCAACGGATTGTCTCAGTGAGAGTTTCCCGTTTTAGGCAGATTTTACATGAGCTTGACTTACGTTAACT
CATAAGCTTGGAATGCATCGTATACGTCTTTTTCTGTTTTAGATTGAGCATAATTCAACGCATCAGCGAT
TTGCCATTTTTCTGCATCCTCAATATGTTTTGCATAGGTGCGTTTAACATAAGGAGAAAGTACTTTATCT
ACATTCGCAAAAGTCGTTCCGCCGTATTGGTGAGAAGCAACTTGCGCAGTAATTTGTGCCATAATTGCAG
TAGCAACTCCAATTGATTTAGGAGTTTCAATCTGCGCATTACCAAGCTTAAATCCGTTTTCAAGCATTCC
TTTTAAATCTACTAAACAGCAATTAGTAAATGGAAGAGCAGGGGAATAATCAATATCATGCACGTGAATA
ATTCCGCTTTCATGCGCTTTCATAATAAAAGACGGGACCATATTTTTGGCAATGTGTTTAGACACAATAC
CAGCCATAAGGTCCCGTTGAGTTGGAAAAACACGAGAATCTTTATTAGCATTCTCGTTTAAAAGGTCTTT
ATTAGTTTTATGAATTAATCCTTCAATTTCTTTTTCAATTGTCATTTTAAACTCTTTCTAAGCTGCTTCT
TGAATGAAGCTATTAATTGTGTTTTGGTGTCAGATTCATTATATTCAAATCCTCTTTGAAGCATCTCGGC
CATCATTTCCTCTTTTCCTAAACGAGAAAATTCCTTTGATTTATCTCCAACAAAGTTAGGGTGAATATTA
TTTTGGGTGTAATCGGATTTTAAATAAGTAAGTAAATTTTCTAACCATTCAAGATAATCAACACCTTGTC
CCTTTAAGCCAGAACGATTAAATTTATGCTTCATTTGACCTTCTGCAGCATTGCATAGATTACAAAGCAA
TCCACGCACCTTTCCTGCTTTTGGTCCATTTAATTCATGGTCATGGTCGAGGTGATTAGCTTGAACATCA
GGATTTAGTTCTCGTTGGCAAATTAAGCATTTACCGTTTTGTGCATCATAAAATTTCTGTTTTTCTTCTT
TGTATAATTTGCCAGTCAATAACATAATAAACCCTTACCTTAAATAGATAAGGGTATTTATTATTTTCAA
GTATTGTAAAACATTTGATGCAATCGCTTATATTGCTGAATCATTCGGTCAGAAAAAGAAATTTGAGTTT
CAAGCCATTCAATGTACTCTGCGGCAGCTTGCATTAAATTTCCTTCATAGCCATCGTTATTTTCTTGTGC
AGCTAATTTAGCTAATGCGTATGAAATACGTTCACCTTGAAAATCGGCTTTAGGCTTCTGAACAACTTGA
TTAGTTCGCTCTACAACTTCTTCAATTTCGCCATTTTCTACTGATTCAGTATTCCACAAACACCAATACG
TAATTGGCTTATCGTAGATGTTAATAATCTTTCCATCAGAAAGTTCAATTTCAATAATTCCAGTGTCAGG
CTCTATATCATCTTCACATTCTTTTACAAGTTCACGAACTTTAAAGACAGTACCTGCACTAAGTTCCGGC
CAGTAATTACACAGCCCTGTATCAGCACGATTAATTCTAAACCATTTATCTACTGTAATCATGTCCCATC
TCCATATCAATTAAGTCATTTATCGTTGGTTCATTATACACCGTTTCTTCATCAGTGTAAACCGGTTCTT
CCGGCTCTGGCTCTACAGTTTCCCATCTAGCCGCCCACCAAGGTTTTATAGCGTAATCCATTCTCGTACT
GTCTGAGTTACTACACGTTCTCGAAGCTCAACCAGTTCAACAGTAGGAACTGCATAATACCAGTCAGAAT
GGTAAGAACCTGAGCGAGATTCATTTACAGCCACATGTACATTATGTTTTGGACTAAAATAAACACACTG
ACGATATTGGCATTTACCATCTTGCACCCAGTCTTCTATTTCGATAGGTTTAAGATAGTCGGAAAAATCG
AAATCATAGTTTTCCGAAAATGCATCATGGTCTTCAATGATTTCGCTCAGAACTGCATCAACATCTAATT
TATTTTCAATATTCATTTTTCACACCACCAACTGCTTACTTCAAAATCGGGTTCGCCATGTTCCCAGAAC
CAGGGGCCGATAGGAATCCACTTACCTTCATCGGTGACGTCATATTCTTCGGATTTAAGCCCAACGTATC
GCCATTCGACTTCATAAGCGGTACCACCGATTACAACTGTGTTCTCGCCATACGGGTTAGACACAACAAA
GTCTATACCTTCTGCTTTAGCTAACCAAATCATGTATTCATAGAGTTTATATTCCAGGTCGCCTTCTGTT
CCATCGCCTAGAAAAATAATTTGTTCATTTAATTCTATCATTTAAAGTATTCCCGCAATTGGTCAAATCC
ACCAATATGACTTCCATCAGGAGCAAATACCTGAGGCATTGTTAAGCCGATTTGAGTATCACGACCTAGT
TTAGTCAGAAGCTCAGCAATTTTCTCATCATCAAAAACACCTTTTTCCGGCATAATGTTGATAAATTCAA
ACGGCTGTTTCTTCACAGTCAAAAGACGTTTTGCATTATCGCAATACACACATTTATGAATGTTGCTATC
ATAACCATATACTTTAAACATATTATTCCTTAATTCCTAGTACTTGTTTAAAAGTCTCGTCGTAATCAAG
ACTTTGGCCCGTTTGTTCTTTATGCTTGTATATAATATCACTTACTTCTGATAGCATATTTTTATATGAA
CGAGTTAAAGCAGATTTAAGCACGCTGTATCTATCAGGAAATTTACCGTGTTCATTATAATAAGCTATTG
CTAATTCACGGACTGCCTTTTCAGCAGTCTCCATATATTCTTTACGCTTTGTCATTTTCTTCTCGGTCAA
ATCGGTGTTTACAATGGCGACATTTATAACGAAGATTATTAGTCTGCCAATGGACCAATTGCACCTGTTC
AGTTCCACATTCAGGGCAATTAGGAACGTTTTTAGAAGCCCTTTCGCGACGTTCAACCATGACCATTACA
GAATCCCAATTAACAGGAGGGCTATAATCATCACAACCATAAATCTTTCCACGCATTTCCAGATCGTCTT
CTTCACCAGCCATAATAATTTTAATTAGACTAGAATTACTTGAAGCTGCAATGTCTTCTAATAGACGCTT
TTTCATTTCAATACCTCAATAGCATTACGTAAACCATTTGCTTTGGCGGTTAAATCCTTAAGAACTTTAG
TATGCTCTTCAATCTGTTTTTCAACTTCAATCAAACGGGTACTGAGATATTCGCGTTCTTCTTTCATAGT
ATCATTCCCATGATTGGGCTTTGGCGTAGGTTTAAATTTATTAGGGTCCTTTAACTTAATAACAACTTTA
GTTTCAAACAGTGAAAGACCATAATTCGTATTATCATCAAAGGATTCAACTACGTCCATTTTAGACAATA
ACGTACGAAGTTTATAAGTCAAAGAACGAATCGTTTTATTATGTTTATTAGCTTCACATGGTTTCATATA
TGGAAGATTTTTATATATTTCATGCGGAGCACAAACAATAATTAACAATTCAAATGGTCCATTCTGAGAT
GATGGAATGAATTTAGCCGTAACCCAATCTTTTACATTTACATTAATAGTACGATCATCGCCATGACAAA
ACAGTCTACGAGAATGCTTAAAAAGCATATTCACATTATTATTAAATTCGTGTGAAAACTCACTGGCAAA
TTTTTCTTTACTATCTTTAGAAAACCATTCTTCTAAATAAGTTCTTTTCACGTCGTTAATAATATTAAAT
GTAACAACATTATCATTTGATACATTAGTCTCAATGTAGCTTGGATACATAAATTTTTTAACATTATTAA
CAGCTATCACAGAAGATAGTAATCGGGAACGTTTGAACCACTCGAGCAAAGAACCAAGAGAATGTGAATA
CGCATTTTGTGTATCTTTACAAATATGGTTTTCCCATCCAATATAGTCTAAAAAATCACGAAGAATATTA
TTGATTACTTCTCTATGTCCTTTCTGATAATCACGATGTTTAGTAATAAGACTGTCAAAATAATCAATAT
AATGTTTACGAGTTTTCATGTTCTTCTCACTTGGTTAATGATTTATACTCCGAGCCATCCTTGGCTTTAA
ATTTTACTTAATTAACTGCAAAGCTTGTTCTAGACGATCAAGACGATTAACGGATTCTTCCCAAATCTTT
TTAGCCTGCTCATATTCTTTCTGCGCTTTATTAGAAATTTCTAGAACTTCTTTATAAGCTTTTTCTAGTG
CAATAACTTCTGGACGAATTTCTATCGGTTCAGGTGAATCATCAAGACATTCCATTAGTTCCTCAAGGGT
AGTTTCTTCTTTAGGAGTATTCACAATTTCATCACATTTTTGTTGGTAAATTTCTTTACTAGTAGGTGAA
TAAGCACATTTCACTTCACGAAGGCTAATTACGAGTTTATATCCTTCCCAACCGCATATATTCTTAAAAG
GATATGTATGAATATTTTCTACTGTTTCCATACAAAGTAATGCGGTCTCTAATTGACGAGTTATAGTGCT
AGCAATTGAGAAAAATTTATTAATATTCTTTTGGTTAGTTTCTGGTGTAAAAAATCCATAATTCACAAAA
ATAGATACTTTATTTTTATCAAGTTCATATTCTTTTATGATAATCATATCAGAAGCCAAAGGATGAATTT
GACGATAATCGCCATAACATAATTTAGAAGCTGATTTTAGAATTTGCTTCTTGAAAAGTCTGAAATTACT
AATCCAACGACGAGTAAAAATATTCTCAGGGTCTTCTTTATTATTGAGATGATAAGAATTAACATCACCG
AACCAATTATATCCTACTACATCTTTAGTTCGTTTAATTTCTTTCCCAAAATTACCAAGAATATCCCGAT
TAACCAAATATGAAAGAAGACGAGACTCTTTAAAGGTTTTCTTGATAACATCTTTATCTACACGGCTAGA
AATTTTACGAATTTCATGAATAAATTTAGTAGAAGAAACAATACTTGCATCAACACTATTGAGCCACTGA
TTGATAATAGAAAGAACGCTATTTTGGCCAAACATCGGTATAGCTTTATCATCAATAACGCTATTGAATG
ATTTGATATATTCGTTACGAGTCATATTAATCTCCTCAGTAGAAAGTAAGAACATTATACCACATCCTTG
TGGCAAAGTAAACTAGTTCAGTGCATTTAGTGCATTGTTCAGTTTAGAACGTTGCTTTGTCAGATTTTGA
ACCCTTGACTGAGCTTGTTCTAACGCCTTTTCAGCTTCTAGCACTTCATTGGTCGCTTTAACTAATTCAG
CATCTACTGCCTTAAGAGACTTCTCAATCGCATCCGCGTGCCATTTTTCAACAGGTTTAAGACTTGGATT
TTCAACAGGAAGAAAATTCACTTTATTGAATTTCCATGCATCTTTATTACCTGAGCTATACATCCAAAAT
TTAGGATCGTTTGATAAGTAATTAGATAAATTTAAGTTATCTTGCACTTCTTGCTTTTTCTCTTGTGTGA
CTTCGTCCTTTCTCAAAAATTCATATTTAAATGAAACGATCATATCAAGTTCATATGATGTTGTATCTAA
CTTAAATCGTTCAAAACGAGGTAAAATCTTAGATTGAACAGCAGCAACAACATCCATATACTTAAATGCT
TCTGTCAACTGCGATTTAAGGCATTCGCAAATTGAAAGAGAATTTTTTGTATTAGGTTTAAAGCTAATTC
GTGCAGTTCTATTATTTTCTTTTAACGGTCTTACTTCCATCTGAAGAGTATAACCATCAAATTTCAGATT
CTTTAAGTTAATGTCAGAGCCTTTTAATCGACTAGCAGTAGACAAAATTTGCTTTAATTGTCTACGGAAC
AGAGCAATAAATCTCCATTCAATACGATAATGATTTGGATTGAAAAATCCAGATGATAAATCGACCTTAC
TTTGACCAACGCCTTGAACAAATAGAGGATTTTTATAATCAATAGTTTTACAGAAATCGGTGAGCTGTTC
ACGAGCAGTCATTTGAGTAATATACCCTGCTTTACTAAAATTACGCACCCATTCACTGCTATTCGTATAC
TTAAAGTGATGAATAACACGATTAACTTTATCAGGGTCTAAATTATTTTCACACAAAAATGTCATAACAT
CACGAGTATAGCTGGCATTACGAACCATATCTTCAATTTGAGAACGAGTTTTCATGGTGTTCCTTAAGAT
TTAAGTAAATCAACAATTTTAATTAACTTTTCACGCTCAGATTTAGCTTTACTACTCAATCCAGATAGTC
TGAAAATTTCATCATCATATTGTTGAATAGAAATATCAGCTCTTCAATTTGCTTATTAAAATAATCAATT
TGTTCAGAATGTTTTTCGTTACTACGAACTGGTACAGGTTTTGTAGGCAATTTAGTTGAACTGGATTCAT
TCGGGCGATAAATTAAAATGCAATTTGAACCAATCGGGCATTTAGCACCAGATGAATATTCTAACGTTCC
AGCTTCTTTTAAAACTTCAAAAGCTAAACAGAGATGATGCCCCATATTAACATAATCAGTAGAGCGAGCT
CTGATGTAATAATCATCTCCACGAGTGCTAAATTTAAAGCATTTAAGGTCTTCTGTATTATTAGTTTTAA
AAATCATTTGTTTATCTAGACCTTTAGCCAATCGAGCACCTAATGCTAATAATCGTCGTTGATTTTCCCA
CAAATCTGCGATCATTTGGTCAAATGATAATTTCGGCATTAGCCGACCATAAAGGTCATATCCTTTATTA
TAATTGCGAAGGATTTCACTCGCATTAATACGAGACAACGCTCCAATTTTATTAAGGGCTTTCATAATAC
GATTAGATAAACTCATTCCAGACCCGTTTGTTCGCTGTAAATGTTTTTCTAATCCAAATCCAATATCAAC
TTTAAATTTATCTAAAATTTCAGCATGAACATCTCTGTCAATAACATTCAAATCCAAAGTTGGGTTAAAT
CTATGAAAAAATTTATCTGGCTCTCCACGACGTAAAACAGTCCATTCATTCATCATTTTTTTATTAACTA
AAGATTTAATTACTGCGTTGACATTATTAATTACTACTGACATATTTTCCTCACTCAATTTTACCAATTA
CGCGGAATAAGATTGAACAGACTATATAAGTACCACATATAGATTGAACTAATGCCATTCCAAAGAACCA
AACAATATTATCAAACCATGTCTGTTTTACGTCGAAAGGACGTAAACTTACAGTAATATTATCACCTTTT
TCTATTGAAGAATACGTCTCTGGGGAAATATATTCACTAAATCTATAACCGTCTTTGAGTTCATATACAG
CAATAAACGATAAACTAGACCCCTTTCCTTGAGTTCCTGTAAGGGTATTAACTACAGTAACATCATAATC
TTTATAATGCATATAATCATTAATTGCGTAATAACCATATGCAATTACTATACATAAACAACATATCAAT
AAATTCAATCTTTTAATTATCAACTGTTTCATAATAATCTCAATTAAAAGGGCTTAGAACCATTATACCA
TCCTTGGTATAAAGCGGTTATGCGAGTACCGTATTTAACCGTTCTTCAAACTTCCGAAGAGTGTTCTGGC
GTTCAGCTCTTTGCTTTTTGTAAGTTTCAATACGCTCTGAAATGAGAGTGTATCGTTCATTTACTGATTC
TTTCATAAAATCAGGAATTTCTCGAGAAGCTTTAATCTCGTCAAATTTATCAATAACAGCTTGCTCTTCA
GCAATTAAGTTATCATACATCAAAATATCTTTCTTGATGAACTCAATATCTTCTTGAGTTACACGAGATA
ATTTAGATGCTTTATCCTTTTTGTACTGTTCGTTAGTATCACGAGACCAGTGTAATGTACGATTTTTATT
CGTATTCTTGTAAATTTCTACAATACCAATCTCATCGATAATAACGATCCAATTCCAACGGGATTTGTAA
ATTTGTCCTCCATTAACAGTGATTTCACCTCCGATTGAGATGTCATTAAAGAACTTGCTTTGTGCTTCTG
ATTTAAATTTACCATCGTTGTAATTTACCAGGTTGAAAATATCTTTAGCGTTCATTTTGTGTTCCTCCGT
AGTTGATAGTTGTATAGTACCACAGAGGAACGGTCTTGTAAACAACTAAAAGAAACTTCTTTCACAATTT
TTTCCACTGAACCAAGCGCTCACTGCTTTCTTAGTTTCAGGAGCAGTGTTATCCATAAACCATTCAAAGG
CAGCCTTTTTATGATTCTGGAGGGCTTCTCGGGCTTTAATCTGCTCACGGTCTATTAACACTAACATATG
AGCCTTTCTTGTCACCAGGGGCTTCTTATGATTTTTTGAATACTCCCAATCATTTGTCCATCGCATCGTT
GTTGCGAATTGAAATACAGCTTCTTTAATCTTAGTTTCGTAAATTTCACGAGCCTTTGAGTATAACATCA
TTACCTCCATTTACCAGTTTAATTCTAGTCATCTTTTTGATGGCAGTCCATATAATCTATTTCTGAACTG
CCTTTTTGTCTTAGAAGGCCTCTTATGAATTTATTTCAGAAGAGTAACCCGTAGCGATTTCTTCCCAACC
GTTTTTGTCGGTCATAATAAAGTCAGCAAGATAAAGTGCAGTACGCAGTGAAACATTACGTAAACGGTTA
ACATTGACTTTCATCCATGATAATGCTTTATAAGTTTCTTCATCAGAAAGACCACGCTTTTGCATCATGT
CGGTTGAAAGAATAACATCTTCAACCCTGACCATAATTTCTTCATTAGTGTGAACACCCAAATCCAAATA
AACTGAGCGGGACACTAATGCTTGTAAATGTGGAGCAAGTTTAGTACCACGGTCTAATTCGCGGTCAATG
TCAACGTTTGTGATAAAAACAATTGTTCCTTTAAATTCGAGCTCACGCTCAATGCCTTTTTCTTCTAAGT
AAGAAGATGCAGTGCTCCAGCAGACTTTACGGGTCTCTCCAGTGTCCAGAGCAGCTTTCAGAAGATTAAG
AATGTCCATATCAGAGAAAACATCCACATCATCAATCAAAAGGACAGAATTCTCTTCACGATTATTCCAA
AGCTGTTCATAAAGACCGATACCAGAGATTTTACCGTTAATGCTTTTATACTCAATGTATCCAATATCAT
TTGCTTTATTCAAAGCTTTATCTAAAGAATATGTTTTACCAATACCCGCCGCACCAGAGATAATTAATGA
ACGAATATTTCCGTTAATAATACCATTCGTCATCATTCCCATAACATTAAATCTTTTATTAATGCGGGTT
TTCATATCTTCATATGATTCTTTAACTTCTTCAACTTTTACACCATCATATGAAATGTCTGATTTGTAAA
CCCAAACACCGCGACGTTTACCGTCAATTTCAACAAAAACTTTACCATCTCCTTGTGCATCTACCGGAGC
ATTATCAGGGAACCATTCACCTAAGAGCTCAAAAGTTCCAGAGATTTCTTTACCGAAGTACATACCCTTA
TTGATAGTTACAGTTTTCATTTTATTCTCCAAATCCGTATCAGTTGATAGTTGTATAGTACCATAAAGCT
TTATGCTTGTAAACCGTTTTGTGAAAAAATTTTGAAATAAAAAAGGGAGCCCGAAGGCTCCCTATCATTT
ATAATAACTTCGATGGTTTTCAAGATAAACCCTCTCAAGGAAGTCATCCCAGAAACTCATGTCTACTTTT
TGCTGCATACCGTTCTTAGAAGCTTCAGTAGATGCTGCTTCTACTTGATCGACCACATCTTCCAAAAACT
CTTGAACGGTTTTAAATGGATGCTTACCCAACTTCACGTCGAGAATAAATGGAGCATCTTGGAGTGGATA
AACCAAGTCACCAGTTTTGTAAATTTCCAATAGTTGAAGTCCACCACGACAAGCATGGCTCAGAGCTTTC
CAGTCAATGCCTTCATTGGCTTCGGCCTTACGAGCACGTTCGCCGTATTCAGCATCTAATTTGTTCAGTG
ACTGCTTAAGCTCAATAAGAGAAAGCGTTGTCTGATATTTACGACCCAACACTGTGTAAAACGTTTGTGG
GCCTGTTTTCTCATGATTATGGAACACCCATTCACAGAATTCGTTTTCTGGAAGACGATGCTTAATATCT
TCAACTTTAGTACGACGCTGCTTAATGGAACCATCTTCTTGGTAATCAACCCATTGCTCAGGGATTTGAT
TAACTACTTTCAATACATCGCGTAATGCAGCCAAACGAGAACCCTTGACGCCGTATTTAGAAGCTTGCTT
GCGGACATATCCTAAATATGATTTCATGTTAGTCGTATAAAAACGAGAACGGTTGTCTTGAATAAACTTC
CAMACATCAGGCAAATCGGATTTAACCACTAGTTCAGGTGGAGTGTGAAGCATATCCAATGCTACAGGTT
CACCATCTGCTGCTAATTTAAAGAAATACTTAAGACTATACAATTCGTGGTCAATATTATCTTTAGTGTT
TTTAGATGATGTGTTGTTGGTATTTTTACTCATGTGCTCTTTGACGTTTCCAATAAGAATATCGCGAGCA
GGAGGAACAAAGATTTCTTTAAAATCTACATCAGATTCTGGAGTAGAAGTTCCATAAAGATGACTACCAA
AATAAGACTTAACTACAGTTTTCATTATTAGACCTTTCATAATCTTCATTAAATTGTACAATCAATCGAT
GATAATTAGATTTTGGATATCCTAATTTACTTATATAAGTTCCGAATGACCCACGTTTAGGTCTATTTAA
TTTAATCCATAACTTATAAAGTAAGTCATAGTCTTGCCAATGTTTACCAGTTCTTTGTCTAATTTTAGAT
GAATTTGATTGTTTCTTTTTAGCTTCAAAATTATTCAAAGATTTTTTGACTGCAGCAGAGTGTTTTTCTT
TAACTCCCGGTCGTTTAAAAGCAGCTTTCACCCCTTTAGATATTTTTTCTTTAACTTCCGGTTTGTTTTG
TGCTTCTAACTGGGATTCTGAAATTTTAGCCCTTATTTCAGGAAGACTTAATGTTATCGAACGTTTTTCT
CTGTATTCATTAGACTTCCACATTTCTTTCATTGTATTAGAATGTATTTTTGAAAATTTTTCTCTAACTA
ACTGATATCCTCTTGAAGTTAATTTGAGATTTCTTCCTAAAGAATCTTCTCCAAAATTATAAAATGACCA
CCATGCATAAATTAATCCAGGCGAATTGTAATGAATTTTAGCTAAAAGCCAATGGGCTATAAAATGCTCT
CTAGCTGTTAATAAAACTAGATTATCAGAATCATCATTACCACCAATACAAGATGGAATAATATGATGCT
TTTCCGTATAAAAATTTAATTTAGATTTATCTAATTTTCTGAGTTTTCCTTTCTTAATTAAATTATTATA
TACTTTAGTATAATTCATTGGTTCTTCGTCTCATTTAATTTTGCTTTGCATTTATAACACATGTCTGTTC
CACTTGAAATAAACATATTTCCTCACTTTGAAATCATAGTTGGAATAACAGAATCAAGATAAGTCTTTAG
TGCAATAGCTTCCTCTTTCTTTAATGTAATGATATGTGATCGAAAATCATCAATTTGACGAATAGATACT
ACATCTCCCTCTTCATAGCATTTTGAAACATTTAAAATAGTTTCATCATTCTGATTACAGGAGTTAGTAA
TAATAGCATTACATTTTTTAAACCATTTTAAATTATGTTTTCTTTTAGTAGAATCATAAAAATATTTAAT
GTTAGTTATAAAATTATCCCAATTATTAATTGATAAGCACATTGACTCGCTTTTAATATTAAATCCTGGG
CATGAAGAATAAAAATGAATTTTATGCTCATCATTAATGCTTACAATTTTATCAGTGTAAGCATATTCAA
TTTGGGTTAAACGAACAATTTCGCTAGGCGTAAAATATAACATGTCATCTTCTTGCGTCAAACGATACAT
GTTATTTACTTTTTCTATAGCCAATTCACCAAAAAGTGGACTAACTTCTAATACTAGTCGTTTCGCCTCG
CTCATCATTACATACTCCTCTGAATCATATTAATAATGTTATTCACCAGATTATAAGTAAACATTGGGTA
ATTATATTGAATCATCACATATATAACAAACAAAACTTTCATTCTCTTCTCCTTGGCAGTTGACAAGATT
ACTATACCATAATCTTGTCAACTTGTAAACCATTAAATGACGTTTTCGATAAAATTTTGAAGCTTTGTAT
GAGCATCAACCATGATTTTCATTTCTTCCTTGGAAAAGCTGTGCCTCTTTCCCGAGAAGAACATTCATAG
TCAGAAACTGCATTAGCATATTCTTCAATTAGCTTCATTAAAAACATCTGTTTTTCAGTTTTCATTATTC
CACCTAATCATTTCAAGATATTGAACTAACTTAGCTTTGGATTTATCCAAATCCCTTTTAGCTGCTTCTA
TACCGTCGTATGAATATCCTTCACAATGCTCAACTGCTAATTGATATGAATCTATTTCAATATCATGCGC
TAATTTAATGATTTTTTCAAACTGTTCGCGTGTTAGCATACTTAAACTCTCGTATTATGATCGATAATTT
CATCAAGAAACATATCTAACGCTTCTACAGCATTATTAACTTTAGCTTCAAATTCTTCAATACCTGATAA
GGCAAAGTTAATGCGTTCCTCATCTGCTTTACGAATTAAAGCTACCAATTCCTTAATTTTATCCGCTTGT
TCGATACTAATCATTATTCCACCACATATGAAAGAGAGAATATTGCACACGCCATGTGAGTTGCAACTTC
ATCACACATATTATAACGTTTCTTAAGAAGTTCTACAAGTTCTTCACTAGTAACTTCATCCATGTCGACG
AAAAAATCACCATTAATGATGACGTAGATATTTCCTTCTTGATTGAGTGCTTCAATTTTCATGATGTTCT
CCTCTTTATCCGATGGTTGTATAGTACCACAGCTCAAACGGAAAGTAAACCGGTAAAATGAAAAAAAGTC
TCCCGAAGGAGACTAATGTTATTCGAGGGAAAGAAGATACTTACTCTGGTAAAACATTCCAGTAATATCA
TCTATCGTGCTTTGGATGGCTGGAGGCATTTCTTTATAAATGCTGTTAGATTGGTCTAGTATGCGATCAA
TCATTTTAATTGTGTCGGTAGGAAGTTTACTGGCATCTGGAATTGAAGGCGTGTATTTTCGACCAGAATA
CCCCAAATATTGCTCACCAAATTTATCAATCAAATCTGGCAACTCGGAAAAAATAAAATCGTATGCTTTG
TGTCTAGCATAACTTTTAGTTTCAAAATGTGCAGAATGAAAATAAGCTTGTGCAGCCATTAATAAACCTA
AGTATTCATCTGCCTTTGAAGGTTTTCCACTTTGTGAAAAGTCGCTGAATTTCATTCAGTCTCCAATTTA
ATGTTCATAATTCTAGCGTATGATTGTGCCATCTCCGCGCCTCGCTCTATACATTCAAAATCAGAAGAGC
ACGGGTCATTTTTATAGGTCGTTCTCATAAAACTATAGAATTGTTCAGACGATTCTACGCTTTTATTTTC
AAAAAGCATATAAACGTGCCTAATACCAGATTCCATAAATTTATCAAAATGAGGATCGACATTCGCTTCA
ATCGATGGAGATAAAACAAATGACAATCCTAGCATGGCAAAAAGTGCTGTTGCTTTTAAGGCCATAAAGG
CCTCCTATCATTTTTGTCCTGTATTTACTTTGTGCCGATGCACGGCCTTAACTTTATCAAGGTATTTTTC
AAAATTTCGCAATCTAGTATAGTCTGCCGGAGATTGGTTGAGTGATACTTCTCGACGCAAAGCTGAAATG
ATATTTCCAACTTCCCTACGAATTTCATCTAATTGAAGAACAGTAAGATTGCGAAGTTGCTTTTCAGTTA
ATTGTAGCATATATACCCCTTTAGTTAGATAAACCTATTTATAACTTTTGCACTAACCGAGCTTTTTAGT
TAATTCATTCCAATGTTTTCTACACAAAGAAACATAAATTTCATCACCAATACAAATTTGATTACCTTCT
TTAACTGGTGTTCCATCTTCCATTAATCGAGCTGTCATAATCGCTTTTTTACCACAATGACAAACTGCTT
TTAGTTCAATAAGTTTATCTGCAATCGCTAAAAGTTCTTTAGAACCTTCAAATAATTTTCCAGCGAAATC
AGTCCTTAGCCCATAAGCCATAACAGGAACATTATATGTATCAACAATTCGGCTCAATTGATGCACCTGT
TCAGTTTTTAAAAACTGAGCTTCATCTACAAATACGCAATGAATATCTTTTTGTGCTTCAGCCCATTTAT
AGAACTCGAAAATATCCATATCATCTGTAATAATATTCGCTTCCTGCTTAATTCCAATGCGAGAAACGAC
TTCACAGACAGAATCGCGAGTATCAATAGCAGGCTTAAGAACTAATACACTCATTCCACGTTCTTTATAA
TTATGTGCAGCAATCAAAAGAGAAGCAGATTTTCCAGCATTCATTGCTGCATAAGTAAAAATTAAACTCG
CCATCTTAGTCCTTAGTTAAATTTTCTAAATATGTTTCTAAATCATTTTCAGCTTTATCGATAGATTTTA
CTAATTCGTAATATGTTTCGGCATCTCCATATTCAGAAGATATTTCAAAAGACAAATCCTTTTCTAAACT
AATAATTTCACCAACTAAAAATAATATTTCGTTCTTTTGTTCGCGAGTAATCATAAGGAATTTATATAAT
CAATGAGTTCTTGTTCTTTATTATCGAATTCTTTAGAAAGTTCTTCGTACTCGTTTGCGCTAAAAGGACC
GCATTCATTACAAACTTTTTCCAATTCACTATTTTTATCCATAACTTCGTGGATAAGAGAAAAGAGTGTG
TCTTTTTGTTCTTTGCTTAAACTCATAACCATGTCACCTTTAAGCAGTATTCTTCTACATGCTGTTTACG
ACCTTTCTTATCAATAAAGGTATATTCAACGAATGTTCCAATGTAGTCTTTATCTACATCATGTGGACTA
TTAATTGGACATTTAGTGCGACAAATGCGTTCCCATTGACGAATAATTACTGCCTTATTCTTTGGGTCAT
ATGGATGTGGATAATGTATATTCATAATAATGGTTCCCAATCAACAATCACAATTTCTAATTTAGAGGAA
TATGTATCTAAAATCCCCTCAATAATATCCCAGTTCCCTTTACCTATGCCTGCACCAATCCTAGGCATAT
AGATTGTAGGTTTAATCAGTTTATTTTCACCAAACTCATTTAATTCTAACATACAATTCATTAAAGCGGA
ATACTCAAAATTTGGCCCTGGTTGAAATTGAGTATAAAGATTGAAGCAGTAAGCTTTATGAGTCCTAAAG
TATTTTTCATAGACTGAGTAAGAACCGAGTTTAGTTACATCACCCCATTCAGTCTGTAATTTATCAGCTT
CCAAAATTTTAGGGAAAGCTTTGGTTAATTGACCCGCTACGCCTGAACCCATAGTATGAAAACAATTACA
TCCATGTGCAATATTTTTACCTTCAGCGAAAAGGGCGACAATATCGCCCTTGATATATTTTACAATCATC
TAGTACTCAATCCTCGATTATAAGAATCTACCAAACGGTCAACCATTGAATGACAAGCGGCTTTATCTTT
CTCCTCCGCAACTGAACATTCTAAGGTATTCCACTTTTTAGCATATCGTTTTAACAATGTATCGTTTTTG
TATCTGCTTGATTTATCTCTTTCTCCGTCTTTATATGCATATATTAATTTCTGTGCAAATTCAGCTTGGC
ATGCCTTATTTTTCCCACAATAATCTGCCGCAGTGCGGTTTACATATTCTCTAATTTCAGTATATGATGT
ATCTGCTGACGCAGAAGCAGAAAATGAAATTAATCCTATACATAAAACCAAAATTTTAGTCATTTACTAT
TTCCAAAAGTTTATTATTTTTAAGGTAATTAGCCTTTTCTAGGACTTCAGAAGCATATTTAGAACCTGCT
TTAACATTCCATCCCGAATTATAAGAGGATATTGCTTTTCTTATATCGCCCTTATGTATATTTAACCAAT
AAGAAAGTTCAATGTACGCCCAGGAAGCTGAATTGGATCGTTTATTCAACATTCTTTTTATTTCAGCATC
GGTCATATTATAACCAAGTTCCTTAACTCTTGCTCGCATAGTAGGCAAATAATTTTGGAACATTCCGTAG
GCGTGATGCTTTGGTTTAGATTTTAAATTAACTCCGCCAGAGCTTTCTTGCCATAAAATGGCAGCCATTA
TATGACCTAATCCGCTCTTGTGGATATTTTTGTGTGTTTTATATTTTCCATCCTTAGAAAATTGTTCCCC
GAATTGATACGCGTAACGCATGTTATCGAGTTGGACATTACTGAAAGTATGCTCGGAGCTATGTGCCATC
ATTGAAATGGCCAATAGACCAGCGAGTAGTGCTTTTCTCATGCTTACCTCATTGAGTTTTAATTACTGCT
TTAGAAGCCTTTCCTGGTAAACGACGACTGTTGATAATTGCCATCCTACATTGAAGTGACGGGTCTTTGA
ACTTCTCGTTAGGTTTACAAACTGTAAATCCAAGCCAAAGATTTCCATCTGTGATTTCTAAACGTCCAGG
ACGATATTCAACCCCATCAATAAAATCCTCGTCAATGTCAGGACGCGGAGGCATACTCAGGAATTCATTA
ACTTCTAAAACATGGTCTTTTATTTTATGGAATAATTCAAAAACGTATGTCTCATCAATCTCCCGTTGAA
TTGCGCGATCAAGAAGATGTTGAGAATATTTTAGATGAAACGATGAGACTCCTGCTGCTTTTGATGCCTC
ACGAATCTCATTGTTAATTTGACGAAACTCCGACTCAAAGTGACGACGAAGCTTATTTCGACGGATAAAA
ACTTCTGTATTGATAGTCATGTTATTCTCCTCTTAACTGATAGAAAAATTATACCACAGTCAAGAGGAAA
AGTAAACAGTTATTCTTTAAATCTAATCAATTTATTCATAGACTTTGAAACTTCGGCACGAACCTCATGT
AGATTTTTGAGCTGTTCAAGACGCTGCGTATAGTAAGCAATTTCATCTTCTTCGAGACAGTCCTGCGAAT
CTTCTTTAAGATAACGTGCATAGTCCTGGAAAGCGTTACGGACTACTTCCTGGAAGTCATCAAGACTTTG
AATTTTCTTAGGAGCAACAGATACACGACGAGGGGCAGTATAATACTCATAACCAAACCCTGCGCTTAAT
TGAGCCATTAGTATTTTTCCTCTGGTTGGAACACTGCACGACAAGCCCACATACTGGCTTCTTTGAGTTT
CGTTTTAGCAATAGTTAACTGATCGAGACTTTCAGCATAATTCTTCGCGAATTCACAGTCTTCGCAATTA
TCTAGTGCTTCCCAGAATTCATCATATAAAGCATCAAAGATAAGTCCTAAACGAACTTCAGCGTCTTTAA
TAGCATTTACTTTACCGATTTTCTCTTCAGTATGTGGTTTATAACCCTTAATATCTTCAATCATATTTGA
CTTCCTCACCAGTACATAATACGTATTCAACTAAACGAATAGGTTCATGAATGCCATAGCCTTGAACAGA
AATTTCTGTCGTAGGATAAATTCCATCAATATCACCCATATTCCACGCTTCATTAAATTGCTGTTCGCCT
GAGTTACTAAACCACTCGCGAAAGCATTTAGCACATCTTCAGAACCTTCAATAATTATCTTTGCCATTAC
AAACTTTCAGTAAAGGTACGAGCGATAACGTCGCGCTGCTGTTCCGGAGTCAGAGAGTTAAAGCGAACTG
CATAACCGGATACACGGATGGTCAGCTGCGGATATTTTTCCGGATGCTTAACTGCATCTTCCAGAGTTTC
ATGACGCAGAACGTTAACGTTCAGGTGTTGACCACCTTCAATTTTAACTGTAGGTTGTGGCTCAATTTCA
ATTTCACGGGCATGCAAACCATAGAAAATTTCTGGGTCTACAAAAGAGTCCTCTTTAAAGGTTTTAGAGA
CAATAATTCGTGCTTGAATACCATCTTCAAAATAAATAGTACCTTTATGTGTGCCTTCAAGAATTTGATA
TGCTTTCATATAAACCTCAATTAGAAAATAAATTTATCCAAGATTGTTCTTTAATTAAAAATGGCTCAGA
ATCATATGCCATTAAACTTTGCGTAATTAATCCTTTAAAAGGTCCATCAATAAATTCCATGGTAAAATAT
GGAATTTTATTCATTAGCCGTGCATTAGGAGCAGTGCACAAAACTCTGCATCCTTTGAATACGCCTTTTT
GTAATTTGTATTGCTTGGGATAAAATTCGCTCAAAATGTTATTTTTTGCCAAAATTTCAAAATGATTCAC
CAATTTATTTTTAATAGTTTTTGGCGAAAAATAAAGATATTCGAAAAGCTGAGTGTCTGTCATCATTGCA
TTCCGATTACGAAAAACTGTGGACGAGTAATACCACCAATGCAACATTTACTATTACAGCAGTAGTGTAC
GGTGTCAATATGGACACTATAAATCTTATCCATATCAGGAGATTTGACAGGCTCATCAATTATATACAAA
ATTCGCGAAAGCTTTAAACCTCTGAACTTGCTTCCTTTATTACCAATAAAACTGCGTACAGAATCAGTAA
ATAAACGAAAACGTATATCATCATTAGAATAACGCGAAAATTCCTTTTTGATGTTATTTGCAGAAATTTT
AGCATAAGCTGAAGTATTAGAAAGAACAATAACTGTTCCGCCATCATACAACCAATTAGCAGCAAAGTTA
GTCACAGCAATTGATTTACCGGATTGACGTCCACCATCTAGTCGAAGTGTACAATACTGTTTAAGTAAGT
CTTCAAATGGCGGGATATATTCGTTTTTACAAATTTCTTCTACTCTAGCATCAGAATGGTGTGTAAAAGC
ATTCATCAGGGATAGATAAGGACCAGTTAAAAATGTTCTCATTTCTTCTCTATAAGCTCTATAAGTTTGG
GCCATTCCGTGGCACATGAATTGTCCATTTCTGTATTTACCCATTACCGCGCTTGGGCTCGACCTTATTA
CAGGTTGGCGGGAATCCCTCATATAATCATGAGGTCCAGGTTGTTCCCTTATGCATAAATCGCCTTACCG
TAGTATTTGTACCAAGTAGGACGTTGTGCAATTTTTTCATCTAAACGAGCTTGTGATATAGCAATAGAAG
CTTCATGGGGAATATAATCACCACGGAATTCCTGAGGAATATCACTAATATCCTGGACTGTAGTATCCTT
GATATTAAAACCACGTTTTAAACATTCAGCTATAAGCTCAATTTGACGTTTACGTAAGAACTCGAGCTTA
TCGTAAAAGAATGTAACATGACCTGCGCCAAGGATAAAAGTAGGACTGATTTTAAAATCACGAACACGTT
TACCGTTAGCAACATGCTTACGAACTGCACCAAAAACACGCGGCAATTCACGATATTCAGCCATTAAGTG
TTGGTCAGCCAATTCAGATACTAAAGTAAGGTTGATACGAGTCATTTTAGTGTTCTCCTGTAGTTGATAG
GTCTATAGTATCATACCTACAGGAGATGTAAACTGTTATTTATCTTTAATTGCTTTAGCTGCTTCGATAG
CCGCTTGCTGAAGGTCATCCATAGACATGCCGAACTTAGAAGCAAAGTTATCAATTTTCTTTTCGACGGC
ATTCAAAGGCTTGGCCTGTTTACCTTCATTAGCGCCAGGAAGAGCGAGAATACGCTCTCTGTCAATATAA
AGGCTTACAAGTTTCTTACGGTCTTTATCGGGCAAATCATGAAATGAATGGGCCTTTTTATTTACAGCGG
CTTCTAATTTACCTGCGCCCACTCGCGCTTCGGCAATAAATTCTTGATATGTTTTCATATGTTTCCTTTA
AATGTAAATATTTTTATTATTCTATCCTAGAATTGTGATAATATATTCACAATTCTAGGAGTTGTAAACT
GCTTTTATTTAAGCGTCCCAAGTATAAGCTTTATTAAGAATTACCACGGGCTGCATTAGCAACGGCGTAA
GCGTACTGAATATTAGCGTCTTTAAACTTACCTTTAGAGGTATCTATTTCTGCCTTAAAGCCGCCTTTAG
TCATAACATCGGCAAATTCTTTACGGAAAGCCATTGCATCAAGACCTTTCCATGATGATTTATGCTTGGC
AAATTCAAGACCTGCGAAGTTGACAGCTTTAGCCAATTTATTATCAATGACCCATTTACCGGCTTTAGGC
ACAAACTTCGGGCCTTTCTGTTTAGAGAACAGTTTTAAATTCCAGCGGCGAAGGTCTGCATCAGCTTTAA
CAAATTCTGAGTCTAAGTTACTAGCAACAACATCTTCAATATGAGCAAATTTAAGTCCGTCAACTTCAAT
ATTTAAATCGGTACGCCAGCGAAGTCCTTCCCAAGCGAAGGCTTTAAAGTCGGAAGCCTTTGTAGCTAAG
TACCGTTCAATAGGAGCTGTTTTAGGGTCAAAGCCGTTTCCTGATCGGTAGGTCCACTCATCTTTGTTAA
TGCCTTTGGCCTTTACTACAGAAGCTTCGGCAATAAATTCTTGATATGTTTTCATATGTTTCCTTTAAAT
ATTTTAATTAGTAATTGTCTATTCAAGTAATTGTGAATATACTATCACAATTCCAAGAGAAAGTAAACAG
CTTTATAGATTTTTATACGCGTCCCAAGTGCCAGTTCTAAACGTTGTAATGACTCGTTTTGCGCGATTAG
GTGTTTGATTATACCATATACTTTTAGCTAAGTTAACTGCTGCTTCATCCCAGCGTTTTTGTTGAAGCAT
ACGTAAAGAGTTAGTAAATCCTGCCACACCGGTTTCTCCCATTTGGAAAACCATATTAATCAATGCACAG
CGACGAACCGCATCAAGAGAATCATAAACCGGTTTTAATTTAGCATTTCTCAGAATTCCGCGAACAGCAG
CATCAACATCCTGATTAAAGAGTTTTTCAGCCTCATCTTTTGTAATTACACCATTGCAATTACGCCCAAT
AGCTTTATCTAATTCAGATTTAGCAGCATTAAGTGATGGACTTTTTGTAAGCAAATGACCGATGCCAATA
GTGTAATAGCCTTCTGTGTCTTTATAGATTTTAAGTCTAAGACGTTCATCTATACGTAACATTTCAAATA
TATTCATAATACCTCCTAAGTATTTATAGAAGGTATTTATAAAATTAAAAGAGGTTGTTCATTATTCGGT
AAAGTGAAGGACCCATCACATATTGCCACTGAGTACGAGGAATAAGAGCAAAAGCGTCCATCTCTGGAAT
CATAACGCCATCTTTATTTTCAAAATAAGACTCGCAACGGCAATTTCTGAACATCTCATGCTCTACTGGA
ATCGTGTAATAAAATAACTGTAGGTCTTTATTACTAGAATATTTAAATACACCTAGGTCTTCTAGAAGGT
CTGGATTATAATTGCTAAAACCAGTCTCTTCTAAACATTCTCTTCGTGCTGCATCTAATGCGCTTAAATC
AGAATTTTCTACACGGCCCTTTGGAATATCCCAACGATGTGCCATCATTCCAGTCTTACGAGAACCAGTA
ACCCGACCCATAAATAAATCTTTATCTTCTGTCATAAAGATAATACCAGCTGATAATGTTTTCATTTTAA
TTTCCTGCATTCAGTGATAAAGTTATTTAAATTTTGAGCATATTTCTTTTCATCAAAAATCTTTTGCTGT
CTGCGTAACCGCCATGGCATTTCAATGAACATACGCCATATCCCTAGATAATACCGCTGCTGTAAAAATA
TTAACAAGTATAGTTAAAAGAATCCAATCGCCTATTCTGTCCATTGGATTTTTATAAAAAAGTAAAATAC
GAATGATGATATAGGAAGACTAATGATATACCACAGAAGAACCTTCTTATCTGTGAACCAATCAGCATTC
GTTAACTTAGCGCGACCATTTTGAATACACACGAATTTATCATCTGTTACAGTAAATGGCTTAGCTGCTT
GATATCCCATTCTAAACTCCCTAATTAATCGTTTCTTTGTATCTTCGGAACAACCATTCCAATCAACTCT
ATCAACTGGAATGCCATCATCCCCATCATCTAAATCATACCAGCGAGTTTTTAAAATCATTTAATTTTCC
TGCAATCAATCACAAACTCTTTCATTGATTCATTTTCAATATAAGACATGTAGCTATTATATTCTTTTAA
TTGTATTTTGTAATCCTTTTTTCTTTGCCAATTTATTTTAAAATTATCATAATGAAAATATAAAATGATA
CCAAAGAATGAAAACAATGAAATAATTTTAGTATAACAAAGCTCGCTCCAAACTTCTATTATATCTACTG
TACCACTGATTTTTAAAATAAAACAGTCAATTAATAGTCCAATAAGACTACCTGTAAGAGCTGCAGCCAA
CGCCACAGCAAAAATTAAAAATGACTCAGAAAACGAATATTTGACTTTATTTAGCTTTGGCTTTTGCATC
GTGATTCCTTAACAAATTTCATAATTTCATTAAATTCATACTCAGCAAGTTTAAGCTGGTGTTCCTTTTT
AATCTTTTTGCACTGGGCTTTCCAATCACGTACGCGTTTACGATAATGTCTTCCTTGATACCAGTATCCT
ATCCAATTTACGGGTACTAATAAAAATGGAACTACCAATGGAAGAGTTAGCATTAACATAATTATTACGC
CAGAATCAATATCAGTCATAACATCTAAAACACCTCCAATAATCAATAGAATTACAAATGATATAGCTAT
CACAGGACCTATTAATACATCAGTAGAAATTATCTGGCGCTTTAATTCATACTTCAAAGGTTTACTTGGA
AGGTATAGTGATGGCTTTGACATATTCTCTACATTCCTTAACAAATTTTTCTAGTAATAAATCACTTTCA
AAATTAGGATTTTCCACTAATTTATCAAAAAGATCATCAACAATATTCAAGATATTTCTTTTACTAAGAA
TACGTTTATTTTCATGCTTCGTTTCAGAATCAACTATAAGAGTAAAGAAATATTTCTTTCCCTGAAATTT
TACCGTAGTATCAATATAAAATAAATTTGACTTTTGTAAATTACGTTTAAACCATGCGTCACTTAAACTA
TAAACACCGAGATAATCAAAATCGTCGTTTAAATAACAAACTGACCATTCAGGAGAAATGAAATCAGTAA
ATTCAACATCAAAATCACATGTCAATGAATGAATTGATTCAATACTGTTAATAAGTATTCCAGGACGTAT
TAAAGACTTTTTACCTCTGGAAAATCTTCCAGAAAGACTTTCATCAGTTTCATATGAAGAACCCCAATAA
TAATTACGTCCTTTTGCCATATGTTTAAGAGCATTTAGTAATTGGTCTGGAACATCAACGTGTCTTTGGA
ACTCTTCAAACATTGAATTGAAATCACTTTGCATTTTCATTCCTATTTACTCCAAGTAATAGGGGCCGAA
GCCCCTTATCATTATTTCAGAGAATTAATATATTCCTGAACATCGGCAGAGGTAGTTTCAACCCCAGAAA
TATTACCATTAAAGGTTTCAACTCGAGCAAGAGTATCTTCAATATCAACCTTAGTCAGTGCTGCAATTTC
AACTACATCATCAGCAGTACTAATTCCAAGGGCATTTGCTGCACGAGTTTCACGGATATATTCCAATTTA
ACTGCAAGTTCTTGGCGAGCATCATCTAACTCAACTACTTTCTTGGCGATTTCAATTCGCATTTCAGCAT
AACCATCAGCTTTAGTAGTCAGCTGTTCAGCTGTTCGACGATATAGCAAGCCGAGTTTAGCATGCATTGT
TACATCTTGACCTTCGGAAAGAAGCTTGCGAATTTCACGCTCTTTTGATTCGGCCTGTTTATTCTTTTCA
ACAATAAGTTCACGAATACGTTTTTCTTCATTAATAGATTTAACAGAAGCAGTTTTTAGGTCTTTAATTT
TATCAAGTAGTTTTGCTGCTGCAGCAGTATACTGTTCTTCAACAGATAGATTTTTAGCCATTGCAGAACC
AAGTTTAGTGCGAATAAACTCAACAATTTTCTTCAGTGTGTTCATAGTATTTCCTTAGGTTGGTATAATT
AGATAATATAATATCACGTTTCTAATAGATTGTAAACTTATTCTTCGTCTAGCTCGTCGATAAAGGCGTT
GATGGCCTCGATAATGGCATCATTGATAGCCAATAAAATAAAATCATCGTCAGTACCTTTAGAAGATTCT
AAAGCATTGATATATGCTTGGTTGACGAGTTCCCAAGCCTTTTTAAAATAAGGAGCTTCATCATCAGGAC
AAATATCCCGCACGCCTTCAAAGATACGTTTGGCATAATCTAACACCCATTGTACAGGCATGTTTTGAGA
ACGTTCGTTAAACTCTTTAAAGTCCTTAGATTCAAAAAGCTCTTCAGGATAATTATTTCTATTACAAAAA
GCTTTACTAAAGTTACGTTTCATAATGTTTTCCTCATTTGTATAGGCTCATAATATCTCAATCATSAGCC
TATGTAAACTTATTTCATATTATTGAAATATTCTTCTGCGATTTCGTCGTTATCATGGTAAACTTTAGAA
GACAGTTTAACATAACTTTCAGCAGTGAACATGTTAATCACAACCTTTACAGTATACCACTGACCGTCTT
CATTACCCATTACTGCGTAAGTTTCAAACATCGGATGGTCAGGACCGATAACTTTAATATCATTCACCGT
ACGACCGAAATCTTCTGAAACACATTTCATAAAGAAGTTGAAAAGTTCACCGTAATTATCCATTTTATTC
TCCAAGTTATTTTCTGTATCAGTAGTTGATAGTTGTATAGTACCATGGAAGAACAAGGATGTAAACAGTT
TTGTGAAAAAATTTTTAAAAAGTTTTAGGGAATTCTAGGGCGGAGAGGGGCAATTAAAAGATAGGATAAT
ATATTATAAAGGGTATAAACTAAATGATGCCTAGAGAGGTCTGGAAAGGCTTAGATACCAAAAAGCCCCA
ACCTTTCGGTCGGGGCTAACCGTTGCGGCAACCTTGTCGGGGTTCCACCTGCCAAGGCAAGTGTTTGTAC
GAAACGCCGGGATTCGAACCCGGTTATTAAGTAGTTGACGCTACTCAATATTTTTAAAAGGCCATATCTC
AACCATATCCGAACGTTCCGTCAAAAACGCTACTCGGCTTACGGCAAAGATATTTCCTCGAATCGATAAT
TTGGTGCGCCGTTTCTGCTGTGATGTAAGAGGGCATCAATAAACGCAAAGATTATTAACGCAATTCCTTA
CTCAGGGAACCATCAGTCCGACGACTTACCGGTAGCGACCCGGTTTCTCATTTGGTATCCCGCCCTGGGA
TCGAACCAGGACCGCAAACTTAGAAGGATCGTATGCTATCCATTACACCAGCGGGACGTAATTTAAAATT
TCATTTTTCGACCTTTAAACCATCCTTCTGGAATTGGGTCAGTTTTCTTAATACGTTTAGAAACTTTTTC
ATCTAATGAATGAATCCACATCATACCGAATTGGGAATTCTTTTCACCTTTCTGGTGATTATTTTTGGCG
TGAGATTCTTTCATTTTATTAATAGTTTCAGGAGTATGATGCTTATTTAGAAATCTGCTATTATTTAAAA
ATTTTTCCCTGTATTCAGGAGTTGACCACAAACGTTTAAATACATTTGAACCAATTTTACGATATTTTTC
TTGAAGTAAAATATCATTTTCAAAACGTGACTTAAACGATTTAGCTCCTTTTAAGCTAGCATCTTTCTTC
TGGTTTAGCATTCCAGGAATATTTACATGATCCCATCCACCTTCACCGCCAAGTTTTAAATTATACACAT
CTGGTCTATTTAAAAACTCTTCTGTGACAATATTTTTCTCGGCTTCAAGCATAGATTCTTTATCGTCAAA
ATACTCTAATATTTCTTTAGAAAAATTTTCTATACCATATTTATCTTGGGCTCTTTTTAATAATTTACCA
GAACCCATATATCCATCATCTAAATTTTCGGTAGAATGCACACCAATATAAATTTTATTATTAATTTTAT
TTGTTATTTTATAAGTGTAATAGAACATAAATATCTCCTATTTCTAAGAGTATTTATGTTCTCAAAATAT
GACCCAGACCAGATTTGAACTGGTAACCTTTCCCTTATGAGGGGACTGCTGCTAACCATTGAGCTACAGG
GCCTTGGTGCTGATTGACGGAATCGAACCGCCGACATCCTCATTACAAGTGAGGTGCTCTACCTACTGAG
CTAAATCAGCAAAATTACGGAGGCGATAGGATTTGAACCTATGAGTCGCCGGAGCGACTGCCGGTTTTCA
AGACCGGTGCATTAAACCACTCTGCCACGCCTCCAGTCTCCATACAAGGATTTGAACCTTGGACCTCCTG
ATCCCAAATCAGGCGCTCTACCAAACTGAGCTACACGGAGTAAATTAAATTGGAGCGGATAATGAGAATC
GAACTCACATCATCAGATTGGAAGTCTGAGGTAATACCATTATACGATATCCGCAAATTTGGTGCGAGAA
GTGGGACTCGAACCCACAAGGAAATCATTCCGCAGCATTTTAAGTGCTGTGCCTTTACCAATTTGACCAT
TCTCGCGCTGGGAATAAAGGACTCGAACCTTTGCATCTAGCAGTCAAAGTGCTATGCCTTACCAACTTGG
CTAATTCCCAATTATTAACAAAGGCTCTCTAACAAGAACCCTTGATGATAGAGGGTATTAATCAGTGCGG
TATGAGTTAATAATAACAAATAATTCTTAAAGCATATTTACCATTTATGATGATACGTATTTACGATACA
TTCAAGACCCAAAGGATTCTTGAAAATATCATATTCAAGAGGACCTTTTTCTGTTTCAATAAAGAAATCA
AAATTTACTGTATTAAATTTACGGTCTTCCTTTACTAATTTAACTTGAGAAGATGAACGATCAATGTAAA
CCTTTTCAACTTCAAAACACGTTAAAATGCCATAATCATCAATCAAGGCTTTAGCTGCTTCTTGATCATA
TTTATATCCATTTTCAACGGATGATACTTTCGCATAAAGAATCATCATCAACCTCTATCAACAATAGCAT
GAGTATGGGCATTTACGATTTGCCACCAGTCGAAACGATTGGAACCATAATCTGGTTTATTTTCATTTTC
TTTAATGATATCACGCAGTTTATCTTCTGTTTCAGCATACGCAATTAAATCATCATATCCACCACAAGGA
TAATAATTATCACCTGCGAATAAAAGAAAATTTACCTTAGATGGATTTACGTAATAATGGTCTTTAGGAT
ATTTAGTTCCTCTCCAATCAGTTACTTCAACATAACGGTAAGAAAATCCATTTTTACTTTCAATCCAACT
CCACGCTTCAAAAGGAGTATTAAAAACTTTATCAGGTATTAAATTACCTTCAAAATGAGAAGGATTTGCA
TAATCCCCGGCATAAACATAATATTCGTTAATACTCATTTATTCACCTTTAGAAATTTTATCCATAACGA
TAGCAATTAAACCAATTAAAAATGCTACTACAAGTGAAAACACATTTTCTGCTGTAGTTAATAATCCGCA
TATAAATCCAACAAACATTGAAAAACTAAAAGCAGAAGCAGAAATTGCAATAGCAACATTTCGAATTAAT
TCACAGCGTTTCATTTTATTCTCCTCAGTAGTTGATAGGGTAATAGTATCACAGCTAAAACCCTATGTAA
ACAACTTTGTGAAATATTTATTACAAAAGATTTTTAGCAATAATCTTGAGATGTGCCGCAGAAATGTGTT
TAGCTTTAAACAACGCAGTTTCTTCAGCAGGAGAGATAACGATTGTAGCACCATCCTTTTTAGCAGACCA
CCCATCACCTAGGTAAACAGTACCTTTGATTTCTTCGCCATCAACCAGACTAATCATTGGTTTACCTTCT
CGTCCTTTATTTGCTTTAATAACTTCAGAAGTAAGAGTAGCTTCGGTAATGGTAGAAACCGGGGTAGTTG
TAGAAGTAAATTCTTTAAATGTTTTCATTTTTATTTTCCTAATTAATTTTGATGAGGTAATAGTATCACT
ACCTCATCAGTATGTAAACAACTTTGTGAAATTATTTTAAATCATCTGCCCAATCGAGTTTAAGAGGCTC
TTTGTATTCACGATCTAATACGACCGGAATTTGTACATCACCGCTAAATGATAAGGGCCCAACATTATAA
GACAATGTTATATGCGGTGTGTAATCATCAAAATCATGTGTAGCACCTAGTGCCCGCGCATACATGTGTC
GACAGCGCAGATATTCAGAATCTAGCACAAGTACAAGAGTCGATCCATCTTGTGTTTTCCATACTTCTAA
ATGTCCAGAAGAAGCTACTTCAAAACTTCCACTCGATGGAACATATGGAACATTTACTCTTGAATAACAT
ATAGTCGAATGAATTTTTTCTCTAGGAACTGGATTAGGAACACGTAAAGAGCGCTGAAGTTCTTCCAGCG
CATCAAGTGTTAATTCTGAAAACTTAGCTGCTACATAAAGACCCGTTGAAAAGTCTTTAAATTCCATCAT
TCTTCATCTTTTGCTTCATCTGCAGATTCAGCAGTAAGATTTTTGACAGCTTCAACGATTTCTTCAACTT
TGATAGTATCGCCAGTGATACCTACTGCACGAGCAATTTCAGCCAAAGTTCCTTGCAGAATTTTGGATTC
TTCCATCAGACGAGCAGCTTGATCCTGCGTATCAAGAATGCGAGATTTCAGAGTTACGATTTCAGCAGAC
AGTTTTTGTTCAACAGTTTGTTCAGACATTATAGTACCTTTAGTGTATTTTTAATTTTAGAAAAAAGTTC
TTCAAGAGAACCATCGTTTGTAATTACTAAATCGCCATCACGAATTGGCAATCCAGCTTCTGTAATATGT
GTATCATTGGATTTTTGACCAGGACGAACTACATGAATTACTGTAGCACCCATCGCCCTAGCCGCATCCA
TTTCATGATCTTGACGGGTATCAGGAACGATATAATAATCATAACCTGAGTTAAATTTATCAAGATAATC
TAAAGCAAATAATTTTACCCAGTACATGCGGTCGAAGTTATTAACAATCAAATCCGTACCTAGGGCTTGC
ATCAGACGACGGACTGACCATTGATCTTCAATATTATTTATAACGTCAGTAATCTTATTAAATGCTACGA
AATTAACTGATTCTTTTCCTTCGTCATCAAAAACAAACACACCTTTAATTGGGCTTTTACCATTAAGATA
ACAAAATGCTTGTTCCATAATCGTGATTACTTCTAATTTAGTCAGATTTAAATTAGTCTCACGATCATAG
TCAATTCCTTCAAACTCTTTACGAGTTAAGCAAGGATAGTCAGTGTTTGCTGCAAATACTCCCCATGCAT
AAGCCAATGCATCCTTAATAGGACCAGCAAGTTGGTATTTAACTGCAGAATAATTGCTCATGATAAAATC
AGCAGTAGTATCTTTTCCACTACGCTTTACACCGCTTAAAAAGATTAGTTTCATGTGTTTCTCCTCAAAT
TTAATTAAGATTATAACACACAAAACTGAAGCATTAAACTTCTGCTATAATTTTACCATCTTTTTCTACT
TGAAAATAGGTGTAAGGAATTGTTGCAGTACATACTAAAGCCGGGTCTGAATCTTCCGTGTAGCTAAATT
CTACTTCAGATAGGTCAGAAACCCAAGGCTTATAAAAATTTATTGACATCACGATTTCAGTTTTGCTATT
ATCTAAGATGTAAAGCGTAATGTACTCAGGACCTGTTTTTTGGGCAGTATTTTCACCTGTAAGATAGTTG
CTAGTTCCTAGCATCCATTCATACATTCCTATCCACGACTTAAGTTCTTCATCAACTATAAATCTCACAA
TGAGTGGATCATACTCAAATGTAACACCTGGACGTTGTGCTCGGCCCAGTCCAAACGGCCCAGTCACGGT
ATCAGTAACAGGTATTCTAATTCCTGGAATAGGAACTGACTGAGCATTTAAAGTAAAAGCAGATGTAGTA
TTACTATGTGGTATTGATACTACAAAGTTAGTTGTATTTGCTTGGTTAAAAATTTGTTGCAGAGCTTGCG
ACATATATTCCTCATAATGCTTTATAACTGTTGGTGGTATAATGGGTCTAAGTCCCTTCCATTCAATTCC
ATTTAGAACAAACAACAGAAAAGAATGGAAGATAATAGAATTAGATATTTGACCAGACTTTGTTTGCAGA
GAAACGTTTTCCTTTTGAAACGAACTGCTGAAGTGGCATCAACACAACGTTCGCCCAGTCTTTCGGGGCG
ATTTCAACAAGGCTACCCATAATATTACCAGGTATATATGCCTTAATCATTTGGTCTGCACCCCTAAATC
CTTTCACTTGACTCCAATCAATTTTTAATTTCGTTTTATTAGTAATAGTAGGTGTATTTGCATATTGCTT
TAAAAGCTCTTCTAGGAATTGCTGACGAGCTTTAGGTGGAATATAGTGCAAGTTTAATCCGTACATTAAA
TTATGCTTACCTAAACCAAGGTAAATTATCAAAGGAAATTTATCCCAGTAAGGAAGAGTTTCCTTGTGTT
TAGCATCATAAGCAAAAGCATATATTCGTCCCGGCTGCGGGCGAACAACTTTATGTCCTTTTACTTGCTT
AATAGTTTCAGCAAACCACTTTCTGGTTTTATTATTAATTGCTGCGCCTTCATTACGAATTTTATCACGC
AATGTTTGTCTGAATGAATTTATCATAAGCAGTTGTCTTTCTTGCTTATTGAGTTTATTCATTGGTTTTG
ATTCAAGTTTTTGAATCTTTTCAGCCGTTTTAATTCCTGAAGCATATTTTGACATTGCTGAAGTAAACGT
AGAGTATTTGATTCCTCTTTCTTCAGCAAATTGCTTTCCTGTCATTCCTTTTGCTTTGGCCTTTTTATAT
TCAAGACCTATCTGAATCCATTTCTTTTCGTTTAATGATTGCTTAACCTTTGGAACTTGGGGAGTGCTTT
CATTAATTATTTGAAAAATAGCCATTATGCCCCCTTAAAGCCAAGAGCTCGTAATCCATCTTCTGTTAGA
ATTCTAAATTTTATTCCACGCTTTTCAGCTAAAGATTGTGCTGCTTTCCATTTGTCAGTGTTCACAGACC
AGGTATAAATTTCATTCATAAATCTTTTCTTCGCTGCGGTCGTTAGATGTGCTGGTTTAACTGGTGGTTG
TGTTTCTTTTTTAGGTTTTATTTCAATAAAAAATTCTTGTCCAGAAGAATCTTTCATCCAAATATCCATG
AAGTATCTACGTTTTTTCCCTTCTGCATTACAAAAATAAGGAATTACTGCTGTTTCACTACCCCATGCAA
TAATTTCTGGATTTTTATCTAACCATTCAAAAAAGAATTTTTCCCAATTTGATCTATACGTAATTTTTTT
AGGGTCACCTCTATACTTTGATATATTTTTAGGAACCCATTTTCCAGAATATGCCATTGGATTCTCCTTA
TAAATAGATAATATATTTATAAACAGGAGGGCCCATGCTCTTTACATTTTTTGATCCGATTGAATATGCG
GCCAAAACGGTGAATAAAAACGCGCCGACTATTCCTATGACAGATATTTTTAGAAACTATAAAGACTATT
TTAAACGCGCTCTTGCGGGATACCGCTTACGTACTTATTATATTAAAGGTTCACCACGCCCGGAAGAATT
AGCAAATGCTATATATGGAAATCCACAGCTGTATTGGGTTTTATTGATGTGTAATGATAATTATGACCCG
TATTATGGATGGATTACTTCGCAAGAAGCTGCTTATCAAGCATCTATACAAAAATACAAAAACGTAGGTG
GAGACCAAATAGTATATCATGTGAATGAGAACGGTGAAAAATTTTATAATTTAATATCATACGATGATAA
TCCATATGTTTGGTATGATAAAGGCGATAAAGCTAGAAAATATCCTCAATATGAAGGAGCGCTTGCTGCG
GTCGATACGTATGAAGCTGCTGTTCTTGAAAATGAAAAACTTCGTCAAATAAAAATAATAGCAAAATCAG
ACATCAATTCATTTATGAACGACCTTATACGTATAATGGAGAAATCTTATGGAAATGATAAGTAATAACC
TTAATTGGTTTGTCGGTGTTGTTGAAGATAGAATGGACCCATTAAAATTAGGTCGTGTTCGTGTTCGTGT
GGTTGGTCTGCATCCACCTCAAAGAGCACAAGGTGATGTAATGGGTATTCCAACTGAAAAATTACCATGG
ATGTCAGTTATTCAACCTATAACTTCTGCAGCAATGTCTGGAATTGGAGGTTCTGTTACTGGACCAGTAG
AAGGAACTAGAGTTTATGGTCATTTTTTAGACAAATGGAAAACTAATGGAATTGTCCTTGGCACGTATGG
TGGAATAGTTCGCGAAAAACCGAATAGACTTGAAGGATTTTCTGACCCAACTGGGCAGTATCCTAGACGT
TTAGGAAATGATACTAACGTACTAAACCAAGGTGGAGAAGTAGGATATGATTCGTCTTCTAACGTTATCC
AAGATAGTAACTTAGACACCGCAATAAATCCCGATGATAGACCGCTATCAGAGATTCCGACCGATGATAA
TCCAAATATGTCAATGGCTGAAATGCTTCGCCGTGATGAAGGATTAAGATTAAAAGTTTATTGGGATACC
GAAGGATATCCGACAATTGGTATTGGTCATCTTATCATGAAGCAGCCAGTTCGTGATATGGCTCAAATTA
ATAAAGTTTTATCAAAACAAGTTGGTCGTGAAATTACAGGAAATCCAGGTTCTATTACAATGGAAGAGGC
GACGACTTTATTTGAGCGTGATTTGGCTGATATGCAACGGGACATTAAATCACATTCTAAAGTAGGACCA
GTCTGGCAAGCTGTCAACCGTTCTCGTCAAATGGCGTTAGAAAATATGGCATTTCAGATGGGTGTTGGTG
GTGTAGCTAAATTTAACACAATGTTAACTGCTATGTTAGCAGGAGATTGGGAAAAAGCGTATAAAGCCGG
TCGTGATTCATTGTGGTATCAACAAACAAAAGGCCGTGCATCCCGTGTTACCATGATTATTCTTACGGGG
AATTTGGAATCATATGGTGTTGAAGTGAAAACCCCAGCTAGGTCTCTATCAGCAATGGCTGCTACTGTAG
CTAAATCTTCTGACCCTGCTGACCCTCCTATTCCAAATGACTCGAGAATTTTATTCAAAGAACCAGTTTC
TTCATATAAAGGTGAATATCCTTATGTGCATACAATGGAAACTGAAAGCGGACATATTCAGGAATTTGAT
GATACCCCTGGGCAAGAACGATATAGATTAGTTCATCCAACTGGAACTTATGAAGAAGTATCACCATCAG
GAAGAAGAACAAGAAAAACTGTTGATAATTTGTATGATATAACCAATGCTGATGGTAATTTTTTGGTAGC
CGGTGATAAAAAGACTAACGTCGGTGGTTCAGAAATTTATTATAACATGGATAATCGTTTACATCAAATC
GATGGAAGCAATACAATATTTGTACGTGGAGACGAAACGAAAACTGTTGAAGGTAATGGAACTATCCTAG
TTAAAGGTAATGTTACTATTATAGTTGAAGGTAATGCTGACATTACAGTTAAAGGAGATGCTACCACTTT
AGTTGAAGGAAATCAAACTAACACAGTAAATGGAAATCTTTCTTGGAAAGTTGCCGGGACAGTTGATTGG
GATGTCGGTGGTGATTGGACAGAAAAAATGGCATCTATGAGTTCTATTTCATCTGGTCAATACACAATTG
ATGGATCGAGGATTGACATTGGCTAATATACTTCCAATGAGCGCTGATTTAGGAGAATCCATGGAAGGTT
CTTCTATCGACGTCACCTTTACCGCTCAATTAGAAACAGGTGAAACGTTAGTATCTATAAATATAACTAG
TTACGAAGAAACTCCTGGGGTTTTAGTAGAAGAAAATCGCTTATATGGAACATATGAATCTGTATTTGGT
TTCGGAAATGACGCGTTGAAATATCGTTTAGGCGATGAATTTAAAACTGCTGCTTCATGGGAAGAACTTC
CTACTGATTCTGATACTCAGTTGTATTTGTGGAAAGCTCCTCAAAACCTCCAGAAGACATTCACTTACGA
AGTAACATTAATATATGACTACCAAGAACAAAGTGAATCTGGGGGTTCTGGCAGTAATTCTAGGTCATCT
TCTGATACTACTGAACCGACAGATCCTCCTGCTCCAGTAAGAAAAACTCTAGTTAAAAATTATACTAAAA
CTATAGTTGGAAATTGGAGTCGTTGGGCTAATAAACTGAGAAAATATGCCTATGCAAGACCATAAATATT
TTTATTTGTATTCAATAACTAATAAAACAACAGAAAAAATTTATGTAGGCGTCCACAAAACTTCAAATTT
GGATGATGGGTATATGGGTTCTGGCGTTGCCATTAAAAATGCCATTAAAAAATATGGCATAGATAATTTT
TATAAGCATATTATAAAATTCTTTGAATCTGAAAAAGCTATGTATGACGCAGAGGCAGAAATAGTCACAG
AGGAATTTGTTAAATCTAAGAAAACTTATAATATGAAACTAGGCGGTATCGGTGGCTTCCCAAAACATAA
CACAGCGGGTGCTAAAAATGGATTTTACGGTAAATCTCATTCGCGTGAAACTAGATTGAAAATTAGCATT
AAATCGTCTAGAAAAAGAGGGCCTAGAGGGCTAGAGGTAAAACTCTGAAGATGTGTGGCGCCAATAACCC
AAGGTATGGCAAAATAGCCCCTAATGCTAAATCTGTTATTATCAACGGCGTTTTATATAAAAGTATTAAA
ATCGCAGCTAAAGCTCTTAATATAAATTATAGTACCTTAAAGGGGCGAGTTAAAGCGGGGTATTATAAAT
GTCAGGATTAAGTTATGATAAGTGTGTTACTGCTGGCCATGAAGCGTGGCCTCCAACAGTTGTGAATGCT
ACACAAAGTAAAGTATTCACTGGAGGAATTGCTGTTCTCGTAGCAGGCGATCCAATTACAGAACATACAG
AAATTAAAAAGCCGTATGAAACACATGGCGGAGTGACACAACCTAGAACTTCTAAGGTATATGTCACTGG
AAAGAAAGCTGTTCAAATGGCTGATCCAATATCATGCGGTGATACTGTGGCTCAGGCATCATCTAAAGTA
TTCATTAAATAGGATTTAAAATGGCAAATACCCCTGTAAATTATCAATTAACAAGAACAGCAAATGCTAT
TCCCGAGATATTCGTCGGGGGTACATTTGCTGAAATAAAACAAAACCTCATTGAATGGCTTAATGGCCAA
AATGAATTTTTGGATTATGATTTTGAAGGCTCAAGATTAAACGTTCTGTGTGACCTTTTAGCTTATAATA
CATTATACATTCAGCAGTTTGGTAATGCTGCTGTGTATGAAAGCTTTATGCGTACTGCTAACTTACGAAG
TTCAGTTGTTCAAGCTGCACAAGATAACGGATATTTACCTACTTCAAAATCCGCTGCGCAGACCGAAATT
ATGTTAACATGCACTGACGCATTGAATAGGAATTACATTACTATTCCTCGCGGAACTCGCTTTTTAGCAT
ATGCAAAAGATACTTCTGTTAATCCATATAACTTCGTTTCTAGGGAAGACGTTATTGCTATTCGTGATAA
AAATAACCAATATTTTCCGCGTTTAAAATTGGCCCAGGGACGTATAGTAAGAACTGAAATCATTTATGAT
AAATTAACACCTATTATCATTTATGATAAAAATATTGATAGAAACCAGGTTAAATTATACGTTGATGGAG
CGGAATGGATTAACTGGACGAGAAAGTCAATGGTTCATGCTGGTTCAACATCAACGATTTACTATATGCG
TGAAACTATTGATGGAAACACTGAATTCTATTTTGGTGAAGGTGAAATTTCTGTTAATGCTTCTGAAGGA
GCTTTGACCGCTAATTATATCGGAGGTCTTAAACCTACTCAGAACTCTACGATTGTTATTGAGTACATTA
GTACTAATGGTGCTGACGCGAACGGAGCAGTCGGATTTTCATACGCAGATACATTAACAAATATAACTGT
CATCAATATTAATGAAAATCCAAACGATGATCCAGATTTTGTTGGGGCAGATGGAGGCGGTGATCCAGAA
GATATTGAGCGTATTCGCGAATTGGGTACTATTAAACGCGAAACCCAACAACGATGCGTAACTGCGACTG
ACTATGATACATTCGTTTCAGAGAGATTTGGTTCTATTATTCAAGCTGTTCAGACTTTCACTGATTCTAC
TAAACCTGGGTATGCATTTATTGCTGCTAAACCTAAATCAGGATTGTATTTAACTACCGTACAGCGTGAA
GATATTAAAAATTATCTCAAAGACTATAATTTAGCTCCTATTACGCCATCAATTATTTCTCCTAATTATC
TTTTTATTAAGACTAATTTAAAAGTCACATATGCTTTAAATAAACTGCAAGAATCCGAACAGTGGCTTGA
AGGTCAAATAATTGATAAAATAGATCGCTATTATACCGAAGATGTAGAAATTTTTAACTCGTCTTTCGCT
AAATCTAAGATGTTGACATATGTAGATGATGCAGATCATTCTGTCATTGGTTCATCAGCGACTATTCAAA
TGGTTCGTGAAGTACAAAACTTCTATAAAACGCCTGAAGCGGGTATTAAATACAATAATCAAATAAAAGA
TCGTTCTATGGAATCTAATACGTTTTCATTTAATTCTGGACGAAAGGTTGTAAATCCTGATACTGGTTTA
GAAGAAGATGTATTATATGACGTTCGTATAGTATCAACAGACCGAGATTCTAAAGGAATTGGTAAAGTTA
TTATTGGTCCATTTGCTTCTGGCGATGTTACAGAAAATGAAAACATTCAGCCGTATACAGGCAACGATTT
TAACAAATTAGCAAATTCTGATGGACGCGACAAATACTATGTTATCGGTGAAATAAATTATCCAGCTGAT
GTGATTTATTGGAATATCGCTAAAATTAATTTAACATCTGAAAAATTTGAAGTTCAGACCATTGAATTAT
ATTCTGACCCAACCGATGATGTTATCTTTACTCGCGATGGTTCACTGATTGTATTTGAAAATGACTTACG
TCCACAATACTTAACTATCGATTTGGAGCCTATATCACAATGACAGTAAAAGCACCTTCAGTCACTAGTC
TCAGAATTTCCAAGTTATCCGCAAATCAGGTGCAAGTACGCTGGGATGACGTTGGTGCTAATTTCTACTA
TTTTGTAGAAATCGCTGAGACAAAAACAAACTCGGGGGAAAATCTCCCGAGTAATCAATATCGTTGGATT
AATTTAGGATATACAGCAAATAATAGTTTCTTTTTTGATGATGCTGATCCATTAACAACATACATTATTA
GAGTAGCCACAGCTGCGCAAGATTTTGAGCAGTCTGATTGGATTTATACCGAAGAGTTTGAAACTTTTGC
TACAAATGCTTATACATTTCAAAACATGATTGAAATGCAATTAGCCAATAAATTCATTCAGGAAAAATTT
ACTCTTAATAATTCTGATTATGTTAATTTTAATAATGATACTATAATGGCTGCATTGATGAATGAATCAT
TCCAATTCAGCCCATCGTATGTTGATGTTTCATCAATAAGTAATTTTATTATTGGTGAAAATGAGTATCA
TGAAATACAAGGTTCTATTCAGCAAGTATGTAAGGATATTAACCGAGTTTATTTGATGGAATCAGAAGGA
ATTCTATATCTTTTTGAGCGCTATCAACCTGTAGTTAAAGTATCCAATGATAAAGGACAAACCTGGAAAG
CTGTAAAGCTCTTCAATGACCGTGTAGGATATCCTTTATCTAAGACAGTATATTACCAATCTGCGAACAC
AACATACGTTCTAGGATACGACAAGATTTTCTATGGCCGCAAATCTACTGATGTTAGATGGTCAGCCGAT
GATGTCAGATTTAGTTCTCAGGATATAACATTTGCTAAACTTGGCGACCAATTACATCTAGGATTTGATG
TAGAAATTTTTGCCACTTACGCGACTTTACCAGCGAATGTATACCGCATTGCAGAAGCTATTACTTGCAC
CGATGATTACATTTACGTTGTCGCCAGAGACAAAGTTAGATACATAAAAACGAGTAATGCACTTATAGAT
TTTGATCCATTATCTCCAACATATTCGGAAAGACTTTTTGAACCTGATACCATGACTATAACCGGAAATC
CTAAAGCAGTATGCTATAAAATGGATTCTATCTGTGATAAAGTTTTTGCTCTTATTATTGGTGAAGTTGA
AACATTAAATGCTAATCCTAGAACATCAAAAATAATTGATTCCGCTGATAAAGGAATATATGTTTTAAAT
CATGACGAAAAAACATGGAAAAGAGTTTTTGGTAATACCGAAGAAGAAAGAAGACGTATTCAACCCGGAT
ATGCGAATATGTCAACTGACGGTAAATTAGTTTCTCTGTCTTCGAGTAATTTTAAATTTTTAAGTGATAA
TGTTGTTAATGACCCTGAAACTGCAGCAAAATATCAGTTAATTGGCGCTGTTAAATATGAATTTCCTCGT
GAATGGTTAGCTGATAAGCATTATCATATGATGGCATTTATAGCGGATGAAACATCTGATTGGGAGACTT
TTACTCCTCAACCAATGAAATACTACGCAGAACCATTCTTTAACTGGTCTAAAAAATCTAACACACGTTG
TTGGATAAACAACTCTGATAGAGCTGTGGTAGTTTATGCTGATTTAAAATACACTAAAGTTATAGAAAAT
ATTCCGGAAACATCACCAGATAGATTAGTTCATGAATACTGGGATGATGGTGATTGCACTATAGTAATGC
CAAATGTCAAATTCACTGGATTTAAAAAATACGCATCAGGAATGCTTTTCTATAAAGCCTCCGGTGAAAT
AATTTCTTACTATGATTTTAACTATCGTGTGAGAGATACAGTAGAAATTATTTGGAAGCCAACTGAAGTA
TTTTTAAAAGCATTTTTACAAAACCAAGAGCATGAGACTCCTTGGTCACCAGAAGAAGAGCGTGGATTAG
CTGACCCTGATTTAAGACCATTAATTGGCACAATGATGCCTGATTCTTATTTGTTACAGGATTCGAATTT
TGAGGCATTTTGCGAAGCATATATTCAGTATCTTTCTGATGGATATGGAACTCAATACAATAATTTACGA
AATTTAATTCGTAACCAATATCCACGAGAAGAGCACGCATGGGAATATTTGTGGTCAGAGATATATAAAA
GAAACATTTATTTAAATGCTGATAAACGCGATGCTGTTGCGAGATTCTTTGAATCACGTAGCTATGATTT
TTATTCTACTAAAGGAATTGAAGCATCATACAAGTTTCTTTTTAAAGTTCTTTATAATGAAGAAGTTGAA
ATTGAAATTGAATCTGGGGCTGGTACTGAATATGATATAATCGTTCAATCTGATTCTTTGACTGAAGATT
TAGTAGGACAAACGATTTATACGGCAACAGGAAGATGTAATGTTACTTATATAGAAAGAAGCTATTCTAA
TGGTAAATTGCAATGGACCGTAACTATTCATAATCTTTTGGGACGATTAATTGCTGGTCAAGAAGTTAAA
GCAGAAAGACTCCCTAGTTTTGAAGGCGAAATTATTCGTGGGGTTAAAGGAAAGGATTTGCTTCAAAACA
ATATAGACTATATTAATAGAAGTAGATCATACTATGTAATGAAAATTAAATCCAATTTACCTTCTTCCCG
CTGGAAATCTGACGTTATTCGTTTTGTTCATCCAGTAGGATTTGGATTTATAGCAATTACCCTTTTAACA
ATGTTTATTAATGTTGGTTTAACTCTTAAACATACAGAGACTATAATTAATAAATACAAAAACTATAAAT
GGGATTCTGGATTGCCTACTGAATATGCCGACAGAATAGCTAAATTAACTCCAACCGGTGAAATTGAGCA
TGATTCAGTAACAGGCGAAGCAATTTATGAGCCTGGCCCAATGGCTGGTGTAAAATATCCTCTTCCTGAT
GACTATAATGCTGAAAATAATAATTCAATATTTCAAGGTCAATTGCCGTCTGAACGACGTAAATTAATGA
GTCCTTTATTTGATGCATCTGGAACAACATTTGCGCAATTTAGAGATTTAGTTAATAAACGTCTAAAAGA
TAATATAGGAAATCCAAGAGACCCTGAAAATCCAACACAGGTTAAAATAGATGAATGATTCAAGTGTTAT
CTATCGTGCGATAGTTACTTCAAAATTTAGAACAGAAAAAATGTTGAATTTTTATAATTCAATTGGAAGT
GGTCCGGATAAAAACACTATCTTTATCACATTTGGAAGATCAGAACCGTGGTCATCAAATGAAAATGAGG
TGGGCTTTGCCCCACCTTATCCAACCGATTCTGTATTAGGCGTAACTGACATGTGGACGCATATGATGGG
AACAGTAAAAGTTCTTCCATCAATGCTTGATGCTGTTATTCCTCGCAGAGATTGGGGAGATACTAGATAT
CCGGATCCATACACATTTAGAATTAACGATATTGTAGTGTGTAACTCAGCTCCTTACAACGCTACTGAAT
CAGGCGCTGGTTGGTTAGTGTATCGTTGTTTAGATGTTCCTGATACCGGAATGTGTTCAATAGCATCTTT
AACTGATAAAGATGAATGCCTTAAGTTAGGTGGAAAATGGACTCCTTCTGCTAGGTCAATGACTCCGCCT
GAAGGTCGAGGAGATGCTGAAGGAACAATTGAACCCGGAGACGGGTATGTGTGGGAATATCTATTTGAGA
TTCCGCCTGATGTATCTATAAATAGATGCACGAATGAATATATCGTGGTTCCTTGGCCTGAGGAATTAAA
AGAAGACCCGACTAGATGGGGATATGAAGATAATCTCACTTGGCAACAAGATGATTTTGGATTAATTTAC
CGTGTTAAGGCAAATACTATCCGTTTTAAAGCATATTTAGATTCAGTTTATTTTCCTGAAGCTGCATTAC
CAGGAAATAAAGGATTTAGACAAATATCAATAATCACGAATCCTCTTGAAGCTAAAGCTCATCCAAATGA
CCCAAACGTTAAAGCTGAAAAGGATTATTATGACCCAGAAGATTTAATGAGGCATTCGGGTGAAATGATT
TATATGGAAAATAGGCCACCTATTATTATGGCAATGGATCAAACAGAAGAAATCAATATTCTGTTTACAT
TTTAAATTAAGGGAGCCCATGGGCTCCCTTTTTCTTTATAAATACTATAAACTCATAAGGAAACCGCTAT
GTTCATTCAAGAACCAAAGAAATTGATTGATACCGGCGAAATTGGTAACGCTTCTACTGGTGATATCTTA
TTCGACGGTGGTAATAAAATTAATAGTGATTTTAACGCAATTTATAATGCGTTTGGCGATCAGCGTAAAA
TGGCAGTAGCAAATGGCACTGGAGCAGATGGTCAAATTATCCATGCTACTGGATATTATCAAAAACACTC
TATTACAGAGTACGCAACTCCAGTGAAAGTTGGCACTAGACATGATATTGATACCTCTACTGTAGGTGTT
AAAGTTATCATTGAAAGAGGCGAACTCGGCGATTGTGTTGAATTCATTAACTCTAATGGATCAATATCAG
TTACTAATCCTTTGACAATTCAAGCTATTGATTCAATTAAAGGTGTTTCAGGTAATTTAGTAGTAACTAG
CCCATATAGTAAAGTTACTTTACGCTGTATTTCATCTGATAATTCTACGTCGGTTTGGAATTATTCTATT
GAAAGTATGTTTGGACAAAAGGAATCACCAGCTGAAGGTACATGGAATATTTCTACATCTGGATCAGTTG
ACATTCCATTATTTCATCGTACTGAATACAATATGGCTAAATTGCTAGTTACGTGCCAATCGGTAGATGG
AAGAAAAATTAAAACAGCAGAAATAAATATTCTTGTGGATACTGTTAATTCAGAGGTAATTTCTTCTGAA
TATGCTGTCATGCGAGTTGGGAATGAAACCGAAGAAGACGAAATCGCTAATATTGCATTTAGTATTAAAG
AAAATTATGTAACGGCGACTATAAGTTCTTCAACTGTCGGTATGAGAGCAGCAGTTAAAGTTATCGCTAC
GCAGAAAATCGGGGTGGCTCAATAATGAAACAAAATATTAATATCGGTAATGTTGTAGATGATGGTACCG
GTGACTACCTGCGTAAAGGTGGTATAAAAATAAATGAAAACTTTGATGAGCTTTATTATGAACTCGGTGA
TGGTGATGTTCCATATTCAGCCGGTGCCTGGAAAACTTATAATGCTTCATCAGGACAAACATTAACAGCA
GAATGGGGAAAATCATACGCTATTAATACATCTTCTGGAAGAGTGACTATAAATCTTCCAAAGGGTACAG
TTAATGATTACAACAAGGTAATTAGAGCTAGAGACGTATTTGCTACATGGAACGTCAACCCAGTTACACT
AGTAGCTGCTTCCGGCGATACGATTAAAGGGTCTGCAGTACCAGTTGAAATTAATGTTCGATTCAGCGAT
TTAGAACTAGTGTATTGTGCCCCAGGACGTTGGGAATATGTCAAAAATAAACAAATTGACAAAATTACCA
GTTCAGACATTAGTAATGTAGCTCGCAAAGAATTTTTAGTTGAAGTTCAAGGACAAACAGACTTTTTAGA
TGTTTTCCGTGGAACTAGTTATAATGTAAATAACATCAGAGTAAAACATCGTGGTAACGAATTGTATTAC
GGCGATGTGTTTAGCGAAAACAGCGATTTTGGCTCTCCAGGCGAAAATGAAGGAGAACTGGTTCCTCTTG
ATGGATTTAACATTCGATTAAGACAGCCTTGTAATATTGGTGACACTGTTCAAATTGAAACATTTATGGA
TGGTGTATCACAGTGGAGAAGTTCATATACAAGACGTCAAATTAGATTGTTAGATTCAAAATTAACGTCA
AAAACTTCTTTAGAAGGAAGCATTTACGTTACTGATTTATCAACAATGAAATCAATTCCATTTTCTGCTT
TTGGATTAATTCCAGGAGAACCTATTAATCCTAACTCTCTTGAGGTTCGTTTTAACGGGATTTTACAGGA
ATTGGCTGGCACAGTTGGAATGCCATTATTTCATTGTGTTGGTGCCGATTCAGACGATGAAGTAGAATGC
TCTGTTTTAGGTGGAACTTGGGAACAATCTCATACCGATTATTCAGTTGAAACTGATGAAAACGGCATAC
CAGAAATTTTACATTTCGATAGCGTATTTGAGCATGGTGACATTATCAATATCACCTGGTTTAATAATGA
TTTGGGTACATTATTAACAAAAGATGAGATTATTGATGAAACTGATAATCTCTATGTATCGCAAGGACCT
GGAGTAGATATTTCTGGTGATGTAAATTTAACAGACTTCGATAAAATTGGTTGGCCAAATGTAGAAGCAG
TTCAATCTTATCAACGCGCATTTAATGCTGTTTCAAATATCTTTGATACGATTTATCCTATTGGAACTAT
ATATGAAAACGCTGTTAATCCAAATAACCCTGTTACATATATGGGATTCGGCTCATGGAAATTATTTGGG
CAAGGAAAAGTTTTAGTTGGATGGAATGAAGATATTTCGGACCCTAACTTTGCTCTAAATAACAACGATT
TAGATTCGGGTGGAAATCCTTCACATACCGCAGGTGGAACAGGTGGTTCTACTTCTGTTACATTGGAAAA
TGCTAATCTTCCTGCAACTGAAACAGATGAAGAAGTTCTAATAGTTGATGAAAATGGATCAGTCATTGTT
GGTGGGTGTCAATACGATCCAGATGAATCCGGTCCAATTTACACTAAATACCGTGAAGCTAAAGCATCTA
CTAACTCTACTCACACTCCGCCAACATCAATAACTAACATTCAACCATATATTACAGTTTATCGTTGGAT
AAGGATTGCATAATGAGTTTACTTAATAATAAAGCGGGAGTTATTTCCCGCTTAGCCGATTTTCTTGGTT
TTAGACCTAAAACTGGCGACATTGATGTAATGAATCGTCAATCAGTCGGGTCAGTGACAATATCTCAATT
AGCGAAAGGATTTTATGAACCAAACATAGAATCAGCTATTAATGACGTTCATAATTTTTCTATAAAAGAC
GTTGGCACAATTATTACTAATAAAACTGGTGTTTCTCCTGAGGGTGTTTCTCAAACTGATTATTGGGCAT
TTTCTGGAACTGTAACAGACGATTCTCTTCCTCCGGGTTCTCCTATTACGGTATTAGTATTTGGTCTTCC
AGTTTCAGCAACAACTGGAATGACGGCAATTGAGTTTGTTGCAAAAGTTCGCGTTGCACTACAAGAAGCT
ATTGCGTCATTTACTGCTATCAATTCATATAAAGACCATCCAACTGATGGTAGTAAATTAGAAGTTACTT
ATTTAGATAATCAAAAACATGTATTAAGCACATATTCTACATATGGAATAACTATTTCCCAAGAAATTAT
ATCTGAGTCTAAGCCTGGCTATGGTACATGGAATTTATTGGGCGCACAAACTGTAACTTTAGATAATCAG
CAGACTCCTACAGTATTTTATCATTTTGAGAGAACAGCATGAGTAATAATACATATCAACACGTTTCTAA
TGAATCTCGTTATGTAAAATTTGATCCTACCGATACGAATTTTCCACCGGAGATTACTGATGTTCACGCT
GCTATAGCAGCCATTTCTCCTGCTGGAGTAAATGGAGTTCCTGATGCATCGTCAACAACAAAGGGAATTC
TATTTATTCCCACTGAACAGGAAGTTATAGATGGAACTAATAATACCAAAGCAGTTACACCAGCAACGTT
GGCAACAAGATTATCTTATCCAAATGCAACTGAAACTGTTTACGGATTAACAAGATATTCAACCAATGAT
GAAGCCATTGCCGGAGTTAATAATGAATCTTCTATAACTCCAGCTAAATTTACTGTCGCCCTTAATAATG
CGTTTGAAACGCGAGTTTCAACTGAATCCTCAAATGGTGTTATTAAAATTTCATCTCTACCGCAAGCATT
AGCTGGTGCAGATGATACTACTGCAATGACTCCATTAAAAACACAGCAGTTAGCTATTAAATTAATTGCG
CAAATTGCTCCTTCTGAAACCACAGCTACCGAATCGGACCAAGGTGTTGTTCAATTAGCAACAGTAGCGC
AGGTTCGTCAGGGAACTTTAAGAGAAGGCTATGCAATTTCTCCTTATACGTTTATGAATTCATCTTCTAC
TGAAGAATATAAAGGCGTAATTAAATTAGGAACACAATCAGAAGTTAACTCGAATAATGCTTCTGTTGCG
GTTACTGGCGCAACTCTTAATGGTCGTGGTTCTACGACGTCAATGAGAGGCGTAGTTAAATTAACTACAA
CCGCCGGTTCACAGAGTGGAGGCGATGCTTCATCAGCCTTAGCTTGGAATGCTGACGTTATCCAGCAAAG
AGGTGGTCAAATTATCTATGGAACACTCCGCATTGAAGACACATTTACAATAGCTAATGGTGGAGCAAAT
ATTACGGGTACCGTCAGAATGACTGGCGGTTATATTCAAGGTAACCGCATCGTAACACAAAATGAAATTG
ATAGAACTATTCCTGTCGGAGCTATTATGATGTGGGCCGCTGATAGTCTTCCTAGTGATGCTTGGCGCTT
CTGCCATGGTGGAACTGTTTCAGCGTCAGATTGTCCATTATATGCTTCTAGAATTGGAACAAGATATGGC
GGAAACCCATCAAATCCTGGATTGCCTGACATGCGTGGTCTTTTTGTTCGTGGTTCTGGTCGTGGTTCTC
ACTTAACAAATCCAAATGTTAATGGTAATGACCAATTTGGTAAACCTAGATTAGGTGTAGGTTGTACCGG
TGGATATGTTGGTGAAGTACAGATACAACAGATGTCTTATCATAAACATGCTGGTGGATTTGGTGAGCAT
GATGATCTGGGGGCATTCGGTAATACCCGTAGATCAAATTTTGTTGGTACACGTAAAGGACTTGACTGGG
ATAACCGTTCATACTTCACCAATGACGGATATGAAATTGACCCAGAATCACAACGAAATTCCAAATATAC
ATTAAATCGTCCTGAATTAATTGGAAATGAAACACGTCCATGGAACATTTCTTTAAACTACATAATTAAG
GTAAAAGAATGACAGATATTGTACTGAATGACTTACCATTCGTTGACGGCCCTCCTGCAGAGGGCCAGAG
CCGCATTTCCTGGATTAAAAACGGCGAAGAAATATTAGGAGCTGACACACAGTATGGAAGTGAAGGCTCA
ATGAATAGACCTACGGTTTCTGTACTAAGAAATGTTGAAGTTCTTGATAAAAACATTGGAATACTTAAAA
CATCTTTAGAAACCGCAAATAGTGATATTAAAACAATTCAGGGCATCTTAGATGTATCTGGTGATATTGA
AGCTTTGGCCCAAATAGGTATCAATAAAAAGGATATTTCTGACCTCAAAACGCTAACCAGTGAACACACA
GAAATATTAAATGGAACTAATAATACGGTTGACAGTATTCTTGCCGATATTGGTCCATTTAACGCCGAGG
CCAACTCTGTATACAGAACGATCAGAAATGATTTACTGTGGATAAAGCGTGAACTTGGACAATACACTGG
TCAAGATATTAATGGTCTTCCTGTTGTAGGAAATCCTAGTAGTGGAATGAAGCATCGCATTATTAATAAT
ACTGATGTCATCACTTCGCAGGGAATACGTTTAAGCGAATTAGAAACAAAATTTATTGAATCTGATGTAG
GTTCTTTGACCATTGAAGTTGGTAATCTTCGTGAAGAGCTTGGACCGAAACCACCATCATTTTCACAGAA
CGTTTATAGTCGTTTAAATGAAATTGACACTAAACAGACAACAGTTGAGTCTGACATTAGTGCTATTAAG
ACCTCAATAGGATATCCAGGAAATAATTCGATTATCACGAGTGTTAATACAAACACTGATAATATTGCAT
CTATTAATTTAGAGCTAAATCAAAGTGGAGGTATTAAACAGCGTTTAACCGTTATTGAAACTTCCATTGG
TTCAGATGATATTCCTTCGAGTATTAAAGGTCAAATCAAAGATAATACAACTTCAATCGAATCTCTAAAT
GGAATCGTCGGTGAAAACACTTCATCTGGCTTAAGAGCGAATGTTTCATGGTTAAACCAAATTGTTGGAA
CTGATTCTAGCGGTGGACAACCTTCTCCTCCTGGGTCTCTTTTAAACCGAGTTTCTACAATTGAAACTTC
TGTTTCAGGCTTGAATAACGCTGTTCAAAACCTACAAGTAGAGATTGGTAATAACAGCGCAGGAATTAAA
GGGCAAGTTGTAGCGTTAAATACTTTAGTAAATGGAACTAATCCAAACGGTTCAACTGTTGAAGAGCGCG
GATTAACCAATTCAATAAAAGCTAACGAAACTAACATTGCATCAGTTACACAAGAAGTGAATACAGCTAA
AGGCAATATATCTTCTTTACAAGGTGATGTTCAAGCTCTCCAAGAAGCCGGTTATATTCCTGAAGCTCCA
AGAGATGGGCAAGCTTACGTTCGTAAAGATGGCGAATGGGTATTCCTTTCTACCTTTTTATCACCAGCAT
AACATGGGGCCGCAAGGCCCCAAAGGATTTTAAATGTCAGGATATAATCCTCAGAATCCAAAGGAACTCA
AAGATGTCATTCTAAGACGTTTAGGGGCTCCAATTATTAATGTTGAGTTAACACCCGATCAAATTTACGA
TTGTATCCAGCGTGCCCTAGAATTATACGGTGAATACCATTTTGATGGACTCAATAAAGGTTTTCATGTT
TTTTATGTAGGGGATGATGAAGAAAGGTACAAGACCGGAGTCTTCGATTTAAGAGGTTCTAACGTATTTG
CAGTAACCCGCATTTTACGCACAAATATTGGGTCAATAACATCTATGGATGGAAACGCTACATATCCGTG
GTTTACTGACTTTCTTTTAGGAATGGCTGGTATTAATGGCGGAATGGGAACGTCTTGTAATAGATTTTAT
GGACCAAATGCCTTTGGAGCTGATTTAGGATATTTTACCCAGCTTACCAGTTATATGGGAATGATGCAAG
ATATGCTCTCTCCTATTCCAGACTTTTGGTTTAATTCAGCAAATGAACAGCTCAAAGTCATGGGAAACTT
CCAAAAATATGATTTAATTATCGTAGAAAGCTGGACTAAATCATACATTGATACAAACAAAATGGTTGGA
AATACAGTAGGATATGGAACAGTCGGTCCACAAGATAGCTGGTCATTATCTGAACGATATAATAACCCAG
ACCACAATTTAGTAGGTCGTGTTGTCGGCCAAGATCCGAATGTTAAACAGGGTGCTTATAATAATCGTTG
GGTGAAAGACTATGCAACAGCTTTAGCTAAAGAATTGAACGGTCAAATTTTAGCACGCCACCAAGGTATG
ATGCTTCCGGGCGGTGTTACAATTGATGGGCAGCGCTTAATAGAAGAAGCCAGATTAGAAAAAGAAGCAC
TGCGCGAAGAATTATACTTACTTGATCCTCCATTTGGAATTTTGGTAGGTTAATATGGCTACTTATGATA
AAAATCTTTTTGCTAAATTGGAAAACCGCACAGGTTATTCTCAGACCAATGAAACTGAAATATTAAATCC
TTATGTAAATTTCAATCATTATAAAAACAGCCAAATATTAGCTGATGTATTAGTAGCTGAAAGCATTCAA
ATGCGAGGTGTAGAATGCTATTATGTTCCAAGAGAGTATGTTTCCCCTGATTTGATATTCGGCGAAGACT
TAAAAAATAAATTTACTAAAGCTTGGAAATTTGCTGCATATTTAAATTCATTTGAAGGATATGAAGGAGC
TAAATCGTTCTTTAGTAACTTTGGTATGCAAGTACAAGACGAAGTGACTTTATCTATTAACCCAAATTTA
TTTAAGCATCAAGTTAACGGAAAAGAACCCAAGGAAGGTGATTTGATATATTTTCCTATGGATAACAGCT
TATTTGAAATTAACTGGGTTGAACCATATGATCCATTTTATCAATTAGGCCAAAACGCTATTCGTAAAAT
TACGGCAGGTAAATTCATTTATTCTGGAGAAGAAATTAATCCAGTTCTACAGAAAAATGAAGGAATTAAC
ATTCCAGAATTTAGTGAATTAGAATTAAATGCTGTTCGCAATCTTAACGGTATTCATGACATTAATATTG
ATCAGTATGCTGAAGTAGATCAAATTAATTCTGAAGCTAAAGAATACGTTGAACCTTATGTTGTTGTCAA
TAACAGAGGCAAATCTTTCGAATCTAGCCCATTTGACAATGATTTCATGGATTAATAAATATTATAAACT
AATTAAAGCCCGGATTAGGAGAAGTCATGTTTGGTTATTTTTATAATTCGTCTTTTAGACGATATGCTAC
CTTGATGGGCGATTTGTTTTCAAATATCCAAATCAAACGTCAGTTAGAATCTGGTGATAAGTTTATACGT
GTTCCTATTACGTATGCATCAAAGGAACACTTTATGATGAAATTGAATAAATGGACATCAATAAATTCAC
AAGAAGATGTAGCTAAAGTTGAAACTATTCTACCTCGTATAAATTTACATTTAGTTGATTTTAGCTATAA
TGCTCCATTTAAAACAAACATTTTAAATCAGAATTTACTGCAAAAAGGTGCAACTTCTGTAGTATCGCAG
TATAATCCATCTCCTATTAAAATGATTTATGAATTGAGTATCTTTACTCGCTATGAAGATGATATGTTTC
AAATAGTTGAACAGATTCTTCCATATTTTCAACCTCATTTTAATACAACTATGTACGAGCAGTTTGGAAA
TGATATTCCATTTAAAAGGGATATTAAAATTGTACTGATGTCTGCTGCTATAGACGAAGCTATAGATGGG
GATAATTTATCTCGTCGTAGAATTGAATGGTCATTAACATTTGAAGTAAATGGATGGATGTATCCTCCAG
TAGATGATGCAGAAGGATTAATTCGTACTACTTATACAGATTTTCACGCCAATACAAGAGATTTGCCTGA
CGGCGAAGGTGTTTTTGAATCTGTCGATAGCGAAGTTGTTCCTCGAGATATTGACCCAGAAGACTGGGAT
GGAACAGTAAAACAAACTTTCACTAGTAATGTAAATAGACCAACACCGCCAGAACCTCCTGGCCCAAGAA
CATAGAGGTTATTATGGAAGGTCTTGATATAAACAAACTTTTAGATATTTCTGACCTCCCCGGAATTGAC
GGGGAGGAAATCAAAGTGTATGAACCTCTGCAATTAGTAGAAGTTAAAAGCAATCCACAAAACCGTACTC
CAGACTTAGAAGATGATTATGGAGTAGTTCGTCGAAATATGCATTTTCAGCAACAAATGCTAATGGACGC
TGCCAAGATTTTTCTTGAGACAGCAAAGAATGCTGATTCTCCTCGTCACATGGAAGTATTTGCAACTCTT
ATGGGGCAAATGACTACGACGAACAGAGAAATACTGAAGCTTCATAAAGATATGAAAGACATTACATCTG
AGCAGGTTGGCACCAAAGGCGCTGTTCCTACAGGTCAAATGAATATTCAGAATGCGACAGTATTCATGGG
TTCACCAACAGAATTAATGGACGAAATTGGTGATGCTTACGAGGCTCAAGAAGCTCGTGAGAAGGTGATA
AATGGAACAACCGATTAATGTATTAAATGATTTCCATCCGTTAAATGAAGCTGGAAAAATTTTAATAAAA
CACCCAAGCTTAGCGGAAAGAAAAGATGAAGATGGAATTCATTGGATAAAATCTCAGTGGGATGGAAAAT
GGTATCCTGAAAAATTCAGTGATTACCTTCGTCTACACAAAATAGTAAAAATTCCAAACAACTCTGATAA
GCCTGAATTATTTCAAACTTATAAAGATAAGAATAATAAAAGATCTCGGTATATGGGTCTTCCTAACTTG
AAACGAGCTAATATTAAAACACAATGGACTCGTGAAATGGTTGAGGAATGGAAAAAATGCCGAGATGATA
TTGTTTATTTTGCAGAAACATACTGTGCCATTACTCATATTGACTATGGTGTCATAAAGGTTCAATTACG
TGACTATCAGCGTGATATGCTCAAAATAATGTCATCTAAACGTATGACTGTTTGTAATCTATCGCGCCAG
CTCGGTAAAACCACCGTAGTAGCTATTTTCCTTGCACACTTTGTATGTTTTAACAAAGATAAAGCTGTAG
GTATTCTTGCACACAAAGGCTCAATGTCTGCGGAAGTTTTAGACCGTACTAAGCAAGCAATTGAACTGCT
TCCTGACTTTTTACAACCAGGAATTGTTGAATGGAATAAGGGTTCAATTGAACTAGATAATGGTTCTTCA
ATTGGCGCTTATGCTTCCTCTCCTGACGCAGTTCGTGGTAACTCGTTCGCAATGATTTACATTGACGAAT
GTGCGTTTATTCCAAACTTCCATGATTCCTGGCTTGCTATTCAACCAGTAATTTCATCTGGTCGTCGTTC
GAAAATTATTATTACTACGACTCCTAATGGATTAAATCATTTTTATGATATTTGGACTGCTGCTGTCGAA
GGTAAATCTGGATTTGAACCATATACTGCTATTTGGAATTCAGTTAAAGAACGTCTTTATAACGATGAAG
ATATTTTTGACGATGGATGGCAATGGAGCATACAAACCATTAATGGTTCTTCATTAGCTCAATTCCGTCA
AGAACATACTGCAGCGTTTGAAGGGACTTCTGGTACATTAATTTCAGGAATGAAATTAGCTGTTATGGAT
TTTATTGAAGTAACACCAGATGATCATGGTTTTCACCAATTTAAAAAACCTGAACCAGATAGAAAATATA
TTGCAACTCTAGATTGCTCAGAAGGTCGTGGGCAAGATTACCACGCTTTGCATATTATTGATGTTACTGA
TGATGTGTGGGAACAGGTTGGTGTTTTGCATTCAAACACTATTTCTCATTTAATTCTACCTGACATCGTT
ATGCGTTATTTAGTAGAATACAATGAATGCCCAGTTTATATTGAATTAAATAGTACTGGTGTGTCAGTTG
CAAAATCGCTTTATATGGATTTAGAATACGAAGGTGTTATCTGCGATTCATATACTGATTTAGGAATGAA
ACAAACTAAACGCACGAAAGCAGTAGGATGTTCCACGCTAAAAGACCTTATTGAAAAAGATAAGCTTATT
ATTCATCACCGAGCGACTATTCAAGAATTTAGAACGTTTAGTGAAAAAGGCGTGTCTTGGGCGGCTGAAG
AAGGTTATCATGACGATTTAGTAATGTCTTTAGTGATTTTTGGATGGTTATCAACGCAGTCAAAATTTAT
TGATTATGCGGATAAAGATGACATGCGATTAGCATCTGAAGTATTTTCAAAAGAGCTTCAGGATATGAGC
GACGACTACGCGCCAGTTATATTTGTGGATTCGGTTCATTCTGCTGAGTATGTTCCAGTATCTCATGGTA
TGTCAATGGTATAAATATATTAAAGCATATTAAAGAGGATTAAAAATGACTTTATTATCTCCGGGCATTG
AGCTCAAAGAAACTACGGTTCAAAGCACCGTAGTTAATAACTCTACTGGTACAGCAGCTTTGGCCGGTAA
ATTCCAGTGGGGTCCTGCTTTTCAGATTAAACAGGTTACAAATGAAGTAGATTTAGTTAATACTTTTGGT
CAACCAACCGCTGAAACTGCTGACTATTTTATGTCTGCGATGAATTTCTTGCAGTACGGAAATGACTTAC
GAGTAGTTCGTGCTGTTGATAGAGATACCGCTAAAAACTCATCGCCAATTGCTGGTAATATTGATTACAC
AATTTCTACCCCAGGTAGTAACTATGCGGTTGGAGATAAAATCACGGTCAAATATGTTTCAGATGATATT
GAAACTGAAGGTAAAATTACTGAAGTAGACGCAGATGGAAAAATTAAGAAAATTAATATTCCTACTGGCA
AAAATTACGCTAAAGCGAAAGAAGTCGGTGAATATCCAACACTAGGTTCTAACTGGACTGCGGAAATTTC
TTCATCTTCCTCTGGTTTAGCTGCAGTAATAACTCTTGGAAAAATTATTACTGATTCTGGTATTTTATTA
GCTGAAATTGAAAATGCTGAAGCTGCTATGACAGCGGTTGACTTTCAAGCAAATCTTAAAAAATATGGAA
TTCCAGGAGTAGTAGCGCTTTATCCAGGCGAATTAGGCGATAAAATTGAAATTGAAATCGTATCTAAAGC
TGACTATGCAAAAGGAGCTTCTGCATTACTCCCAATTTATCCAGGTGGTGGTACTCGTGCATCTACTGCT
AAAGCAGTGTTTGGATATGGACCGCAAACTGATTCACAGTACGCTATTATAGTTCGTCGTAATGATGCTA
TTGTTCAAAGCGTTGTTCTTTCAACTAAGCGTGGTGAAAAAGATATTTACGATAGTAACATCTATATCGA
TGACTTTTTCGCAAAAGGTGGTTCAGAATATATTTTTGCAACTGCACAAAACTGGCCAGAAGGCTTCTCT
GGAATTTTAACTCTGTCTGGTGGATTATCATCAAATGCTGAAGTAACAGCAGGAGATTTGATGGAAGCTT
GGGACTTCTTTGCTGACCGTGAATCTGTTGACGTTCAACTGTTTATTGCAGGTTCTTGTGCCGGTGAATC
TTTAGAAACAGCATCTACTGTCCAAAAACACGTCGTTTCAATTGGGGATGCTCGCCAAGATTGCTTAGTA
TTGTGCTCTCCTCCGCGTGAAACTGTAGTTGGAATTCCTGTAACCCGTGCTGTTGATAACCTAGTCAATT
GGAGAACTGCGGCAGGTTCATACACTGATAATAACTTTAATATCAGTTCAACCTATGCAGCAATTGATGG
TAACCATAAGTATCAGTATGACAAATATAATGATGTGAATCGTTGGGTTCCATTAGCAGCTGATATTGCT
GGTTTATGCGCAAGAACTGATAACGTATCTCAGACTTGGATGTCTCCAGCTGGTTATAATCGTGGTCAGA
TTCTTAACGTTATTAAACTTGCTATTGAAACTCGCCAGGCTCAGCGCGACCGTTTATACCAAGAAGCTAT
CAACCCGGTAACCGGTACAGGTGGTGATGGTTACGTATTGTATGGTGATAAAACAGCTACTTCTGTTCCT
TCTCCATTTGATCGTATTAACGTTCGTCGTCTGTTTAATATGTTGAAAACGAATATCGGACGTAGTTCAA
AATATCGTTTGTTCGAATTAAACAACGCGTTTACTCGTTCATCATTCCGCACAGAAACTGCCCAGTACTT
ACAAGGGAATAAAGCTCTCGGTGGAATTTATGAATATCGTGTAGTTTGCGATACAACAAATAACACTCCG
TCAGTAATTGATAGAAATGAGTTTGTTGCAACATTCTACATCCAACCGGCTAGAAGCATTAACTACATTA
CCTTAAACTTCGTAGCAACTGCTACTGGTGCAGATTTCGATGAGTTAACTGGTCTTGCTGGTTAATACGG
TGCATTCTAAAGGCCTGTTTCGGCAGGCCATATAAATACACTATATCCTTAATTCTTTAATTCTATATGC
CCTAGGTTAAACATAGGGATATAAATACTACAGAGGCTAATATGTTTGTAGATGATGTAACACGAGCGTT
TGAATCTGGTGATTTTGCTCGACCTAACTTATTCCAAGTAGAAATTTCTTATCTTGGACAAAATTTTACG
TTCCAATGTAAAGCTACTGCTCTACCAGCTGGTATTGTAGAAAAAATTCCAGTCGGATTTATGAACCGTA
AAATTAACGTAGCAGGCGATCGTACATTCGATGACTGGACTGTTACAGTAATGAACGATGAAGCTCATGA
TGCTCGTCAGAAGTTCGTTGATTGGCAAAGCATTGCTGCGGGGCAAGGAAACGAAATTACTGGTGGAAAA
CCTGCAGAGTATAAAAAGAGCGCTATCGTTCGTCAATATGCTCGTGACGCTAAAACAGTAACAAAAGAAA
TTGAAATTAAAGGTCTGTGGCCTACTAACGTGGGTGAACTTCAATTAGATTGGGATTCAAACAATGAAAT
CCAAACTTTTGAAGTAACTCTTGCTCTCGATTATTGGGAATAAAATGAATGGGGAGAAATCCCCATCCTG
CTTAAAGCAGAGAAGTCCATTATAAATATAACTATAATTCCCATTTGGAGAATACAATGAAATTTAATGT
ATTAAGTTTGTTTGCTCCATGGGCTAAAATGGACGAACGAAATTTTAAAGACCAAGAAAAAGAAGATCTT
GTTTCCATTACAGCCCCAAAGCTTGATGATGGAGCAAGAGAATTTGAAGTAAGCTCGAATGAAGCTGCTT
CTCCTTATAATGCTGCATTCCAAACAATTTTTGGTTCATATGAACCAGGAATGAAAACTACTCGTGAGCT
TATTGATACATATCGTAATCTCATGAATAACTATGAAGTAGATAATGCAGTTTCAGAAATCGTTTCAGAT
GCTATCGTCTATGAAGATGATACTGAAGTCGTAGCGTTAAATTTGGATAAATCTAAATTTAGCCCAAAAA
TTAAAAATATGATGTTAGATGAATTTAGTGATGTATTAAATCATCTATCGTTTCAACGAAAAGGTTCTGA
TCATTTTAGACGTTGGTATGTTGATTCAAGAATTTTCTTTCATAAAATCATTGATCCAAAACGTCCAAAA
GAAGGCATAAAAGAATTACGTAGATTAGACCCTCGCCAAGTTCAGTATGTTCGTGAAATTATAACAGAAA
CTGAAGCTGGCACAAAAATAGTTAAAGGTTACAAAGAATATTTTATATATGATACTGCCCATGAGTCATA
TGCATGTGATGGTAGAATGTATGAAGCTGGCACAAAAATAAAAATTCCTAAAGCTGCCGTCGTTTATGCC
CATTCTGGATTAGTCGATTGTTGCGGTAAAAATATCATCGGGTATTTGCATCGTGCTGTTAAACCTGCTA
ACCAATTAAAATTATTAGAAGATGCTGTAGTCATTTATCGCATTACTCGTGCTCCTGACCGTCGTGTTTG
GTATGTAGACACAGGTAATATGCCTGCTCGTAAAGCTGCTGAGCACATGCAACATGTTATGAACACGATG
AAAAACCGTGTAGTATATGATGCATCAACAGGTAAAATAAAAAATCAACAGCATAATATGTCTATGACCG
AAGACTATTGGTTGCAGCGCCGTGATGGTAAAGCTGTGACAGAAGTTGATACTCTTCCTGGTGCTGATAA
TACTGGCAATATGGAAGATATTCGTTGGTTTAGACAAGCTCTTTATATGGCATTACGTGTTCCTCTTTCA
CGCATTCCGCAAGACCAACAAGGCGGTGTGATGTTTGATTCTGGAACTAGCATTACACGTGATGAATTAA
CGTTTGCTAAATTTATTCGTGAGTTACAGCACAAGTTTGAAGAAGTTTTCCTAGATCCGCTTAAAACAAA
TCTTTTGCTTAAAGGTATAATCACAGAAGATGAGTGGAATGATGAAATAAATAATATTAAGATAGAATTT
CATCGGGATAGCTACTTTGCTGAGCTCAAAGAAGCAGAAATTTTGGAACGAAGAATTAATATGCTAACCA
TGGCAGAACCATTTATTGGTAAATATATTTCTCACAGAACTGCTATGAAAGACATTTTGCAGATGACTGA
TGAAGAAATAGAACAAGAAGCCAAGCAAATTGAAGAAGAGTCTAAAGAGGCTCGTTTCCAAGACCCCGAC
CAAGAACAAGAGGATTTTTAATGGAAGGTTTAATTGAAGCTATTAAATCAAACGACCTCGTAGCCGCTCG
TAAATTATTTGCTGAAGCCATGGCTGCAAGAACGATTGATTTAATTAAAGAAGAAAAAATCGCTATCGCT
CGCAATTTCTTAATCGAAGGTGAAGAACCTGAAGACGAGGATGAAGATGAAGATGACGAAGATAGTGATG
ATAAAGACGACAAAAAAGACGAAGACTCTGACGAAGACGAGGATGATGAATAATGCTTCTGATCCCTGAA
ACTCATGAATTAGTTCTCGAGAATGTCGAAGCACTTATTCCTGAAGCACAGGGTCGCTTTGACGAATTGT
CTTCTGCTTTAAATAAAGACGATATAAATACAATTGTCGAGAATATGCTTGATGATGAAACTGATTTAGC
GGTTGCATTAGCTTCTATTAATGAAAATATGCCGTTAAATGAATTCATCGTTAAACATGTTTCTGCCCGT
GGTGAAATTACTCGCACTAAAGACCGCAAAACGCGTGAACGAAATGCATTTCAAACCACTGGGCTGTCTA
AAGCAAAACGTAGACAAATTGCTCGTAAAGCTACCAAAACGAAGATTGCCAATCCAGCAGGTCAATCTCG
TGCTCAGCGTAAGCGTAAAAAAGCTCTTAAACGCCGTAAAGCATTAGGATTAAGCTAATGAATGAACCCC
AATTACTAATTGAAACTTGGGGTCAACCTGGCGAAATTATTGATGGCGTACCAATGCTTGAATCTCATGA
TGGAAAAGACTTAGGTTTAAAACCGGGTTTATACATCGAAGGAATATTCATGCAAGCGGAAGTCGTCAAT
AGAAATAAACGTCTTTATCCAAAACGTATATTAGAAAAAGCGGTAAAAGACTATATTAATGAGCAAGTTT
TAACTAAACAAGCTCTCGGAGAATTAAATCATCCTCCACGCGCTAATGTTGACCCGATGCAAGCCGCTAT
CATTATAGAAGATATGTGGTGGAAAGGAAATGACGTATACGGACGAGCTCGTGTTATTGAAGGTGACCAT
GGTCCTGGAGATAAATTAGCAGCTAATATTCGTGCCGGATGGATTCCAGGAGTTTCTTCTCGTGGATTAG
GTTCATTGACTGACACAAATGAAGGTTATCGTATCGTAAACGAAGGATTCAAATTAACTGTAGGTGTTGA
TGCAGTATGGGGTCCAAGTGCTCCAGATGCATGGGTAACTCCTAAGGAAATTACCGAATCACAGACGGCG
GAAGCCGATACAAGTGCCGATGACGCCTATATGGCTCTCGCAGAGGCCATGAAAAAAGCGTTATAAATAT
TATTATCTAAACAACAGGACTACAAAATGCTTAAAGAACAACTGATTGCCGAAGCGCAGAAAATTGATGC
TTCCGTTGCTCTTGATAGTATTTTCGAATCAGTTAATATTTCTCCGGAAGCAAAAGAAACTTTCGGCACT
GTATTCGAAGCTACCGTCAAGCAGCACGCCGTTAAATTAGCTGAATCTCATATCGCTAAAATTGCTGAAA
AAGCAGAAGAAGAAGTAGAAAAAAATAAAGAAGAAGCCGAAGAAAAAGCTGAGAAGAAAATCGCTGAGCA
AGCTTCTAAATTCATTGACCATCTTGCAAAAGAATGGCTCGCTGAAAATAAATTAGCAGTTGATAAAGGC
ATCAAAGCCGAACTGTTTGAATCCATGCTTGGTGGATTAAAAGAGCTCTTTGTTGAACACAACGTTGTTG
TTCCAGAAGAATCAGTTGATGTTGTAGCTGAAATGGAAGAAGAGCTGCAAGAACATAAAGAAGAATCGCC
TCGTCTGTTCGAAGAACTGAATATGCGCGACGCATATATCAATTATGTGCAGCGTGAAGTGGCATTGAGC
GAAAGTACTAAAGATCTGACTGAGTCTCAAAAAGAAAAAGTCTCTGCTCTGGTCGAAGGTATGGATTATT
CAGATGCATTCTCAAGTAAATTGAGTGCAATCGTAGAAATGGTGAAGAAATCTAATAAAGATGAAAGCAC
TATTACTGAGAGTATAAATACTCCTGATACTGAAGCAGCCGGACTGAATTTCGTCACTGAAGCTGTAGAA
GATAAAGCTGCACAGGGTGCAGAAGATATTGTAAGTGTATATGCGAAAGTCGCATCTCGTTTCTAATTTT
AAAGGTTAACACAAATGACTATCAAAACTAAAGCTGAACTTTTGAACAAATGGAAGCCATTACTGGAAGG
TGAAGGTTTACCGGAAATTGCTAATAGCAAACAAGCGATTATCGCTAAAATCTTTGAAAACCAGGAAAAA
GATTTCCAGACAGCTCCGGAATATAAAGACGAAAAAATTGCTCAGGCATTCGGTTCTTTCTTAACAGAAG
CTGAAATCGGTGGTGACCACGGTTACAATGCTACCAACATCGCTGCAGGTCAGACTTCTGGCGCAGTAAC
TCAGATTGGCCCAGCTGTTATGGGTATGGTACGTCGTGCTATTCCTAACCTGATTGCTTTCGATATTTGT
GGTGTTCAGCCGATGAACAGCCCGACTGGCCAGGTATTCGCACTGCGCGCAGTATATGGTAAAGACCCAG
TGGCTGCCGGTGCTAAAGAAGCATTCCACCCAATGTATGGTCCAGATGCAATGTTCTCTGGTCAGGGTGC
TGCTAAGAAATTCCCAGCTCTGGCTGCTAGCACACAAACCACAGTAGGTGATATCTATACTCACTTCTTC
CAGGAAACTGGTACTGTATATCTGCAAGCTTCTGTTCAAGTAACAATCGATGCTGGTGCGACTGATGCTG
CTAAATTAGATGCTGAAATTAAGAAACAAATGGAAGCTGGTGCACTGGTAGAAATCGCTGAAGGTATGGC
TACTTCTATCGCTGAACTCCAGGAAGGTTTCAATGGTTCTACCGATAACCCATGGAATGAAATGGGCTTC
CGTATCGATAAGCAAGTTATCGAAGCTAAATCTCGTCAGCTGAAAGCTGCTTACTCTATTGAATTAGCAC
AAGACCTCCGCGCTGTTCACGGTATGGATGCTGATGCTGAACTGTCTGGTATTCTGGCTACAGAAATTAT
GCTGGAAATCAACCGTGAAGTTGTTGATTGGATTAACTACTCAGCTCAGGTTGGTAAATCTGGTATGACC
CTGACTCCGGGTTCTAAAGCTGGTGTATTTGACTTCCAGGACCCAATTGATATTCGTGGTGCTCGCTGGG
CGGGTGAATCCTTTAAAGCTCTGTTGTTCCAGATTGACAAAGAAGCAGTTGAAATTGCTCGTCAGACCGG
TCGTGGTGAAGGTAACTTCATTATCGCTTCCCGTAACGTAGTTAACGTTTTGGCTTCAGTTGATACCGGC
ATTTCTTATGCTGCACAGGGTCTGGCTACCGGCTTTAGCACTGATACTACCAAGTCAGTATTTGCTGGTG
TTCTGGGTGGTAAATACCGCGTATATATCGACCAGTATGCTAAACAGGATTATTTCACTGTAGGTTATAA
AGGTCCGAACGAAATGGATGCTGGTATTTACTATGCTCCATATGTAGCTCTGACTCCGCTGCGTGGTTCC
GATCCGAAGAACTTCCAACCGGTAATGGGATTCAAAACTCGTTACGGTATCGGTATCAACCCATTTGCAG
AATCCGCTGCTCAGGCTCCGGCTTCTCGCATCCAGAGCGGTATGCCTTCTATTCTGAATAGCCTTGGTAA
AAACGCTTACTTTAGACGTGTATATGTTAAAGGTATCTAATCTCTAACGATAGAAACACAATTTTAGGGA
ACCTTCGGGTTCCCTTTTTTCTATTTTATACGATAGCAATCAGGCATATCATCCGCATTTATCCAATTGC
GAATAGTTTTAGGACTAACTTTAAAATGCTCCGCTGCGTAATCAGGATTATCAAATTTAACGCCCTTTAT
ACATATTGGAATAAATTTTTTAATACCACCAAGTTTTTCAGAAATAGCTTTACGATGTGAAATCGATATA
GGTTTGTTTTTTCGTGGATGAACATGTGTTTTATAATATTCATTGCGCCCTTTAACTCGCTTCGCAATAG
TTTCATCAGATTGCTTAACGCCTGTTTTTGCCTTTGATATTTTTCGTTTAGCTTCCACAGTCATTCCTTC
TTTTGTTCGTATTGATAACATATTACGATATGAAGGATCTTGCAAATGAACTATAACTGGATTTCCTCTG
CCACCAATAGCAGCATTATAGGTATCAGTTCTCATAACGAATTCCTCATTAACTAGTAAAGCTTCCATTT
TATACATCTCCTCAGATGAGGAGAAAGAATAAAGAATTTCTTTTTTAAAGTTATGAATACCATATTTTTT
GATGGATTTTTTGATGTTTACGCCAGAACCCATATAACCATCGTTTTCGTCAAGAGTAGCATGAGCTCCG
ATGTAAATTTTTCCATTGATGATATTAGTAATTTGATATATTAAATATTTCATTTTAAACATCACTCCGT
TTGTATATGATTATAATATCATATTACTTTGGTCTTGTAAATAACTTTATAAATAGTATTATATTTCAAC
AAGGAAAATACAATGGCTAAAATCAACGAACTTCTGCGCGAATCAACCACAACGAATAGCAACTCAATCG
GTCGCCCAAATCTCGTTGCTTTGACTCGCGCTACCACTAAATTAATATATTCTGACATTGTAGCAACGCA
AAGAACTAATCAACCTGTTGCTGCTTTTTATGGTATCAAATACCTTAACCCAGACAACGAATTTACATTT
AAAACTGGTGCTACTTACGCTGGCGAAGCTGGATATGTAGACCGAGAACAAATCACAGAATTAACAGAAG
AGTCTAAATTAACTCTCAATAAAGGCGATTTATTCAAATATAATAATATCGTTTATAAAGTATTAGAAGA
TACTCCATTTGCTACTATCGAAGAAAGTGATTTAGAATTAGCTCTTCAGATTGCAATCGTTCTTTTAAAG
GTTCGTCTATTTTCTGACGCAGCGTCAACAAGCAAATTTGAAAGCTCTGATAGTGAAATTGCGGATGCTA
GATTCCAGATTAATAAATGGCAAACTGCAGTTAAATCTCGTAAACTTAAAACTGGCATCACAGTTGAATT
AGCGCAAGATTTAGAAGCAAATGGATTCGATGCTCCTAATTTCTTGGAAGATTTGCTTGCAACTGAAATG
GCAGATGAAATCAATAAAGACATTCTGCAGTCTTTGATTACAGTGTCAAAACGCTATAAAGTTACAGGAA
TTACTGATAGTGGATTCATCGATTTGAGTTATGCATCTGCTCCTGAAGCTGGTCGTTCATTATACCGAAT
GGTATGTGAAATGGTTTCGCATATCCAAAAAGAATCAACTTATACAGCAACGTTCTGTGTTGCTTCAGCT
CGTGCCGCTGCGATTCTTGCTGCATCAGGCTGGTTAAAACATAAACCAGAAGATGACAAATATCTTTCAC
AAAATGCCTACGGGTTCTTAGCTAATGGTTTACCGCTTTATTGCGATACTAACAGCCCATTAGATTATGT
AATCGTTGGCGTAGTAGAAAATATCGGTGAAAAAGAAATTGTTGGATCAATTTTCTATGCTCCGTATACA
GAAGGTCTCGACTTAGATGACCCTGAACATGTAGGTGCATTTAAAGTTGTTGTTGATCCAGAAAGCTTAC
AACCATCTATCGGTTTATTAGTTAGATATGCTTTATCAGCAAATCCTTATACTGTAGCAAAAGATGAAAA
AGAAGCAAGAATAATTGACGGTGGAGACATGGATAAAATGGCAGGTCGTTCAGATTTGTCTGTTTTATTA
GGTGTTAAGCTACCAAAAATTATCATTGATGAATAAAACAAAGGGACCTTTCGGTCCCTTTTTATTTAAC
TTACCAACTCAATCCAAGCTGGACGAAGTACATCTTGTACCATTTTAACTAATTCCTTTTTAATCAAAGA
AGGATTATCTGCTTGAGTTAGAGTAATACCTTCACGAGAAGTTTCTTCCAAAATATCTTGAACAGTTAGC
CCCATCACCTTTCCAAAATCCTTTGGACCAATTTCGCCAATTTTAGAAATAACGTTATTTACGCGGTTCA
GTGTAACGTAACAAGCTAAAATTCCCACCAATTTGTTATCAGCTTCTGATAGCTCAACTTTAGCTTTAAT
AGGCTTATCAGACTTTTTCTTTTCACTAAATTTAGAGTTCTTGCATTTAATCGCTACACGATTTCCATTA
CGAAGCCAAGAAGGATAACAAGGTTTCAATACATATCCTTCAGCAGTAAATACTTCGCCTTTTGCTTCGG
CATTCCAAACGCATTTATTTGCATCAACTAATCCAGCATGGTCTACTGTAAAATTATAATCTTGGACGAC
AGAATCTAAATCATTTGGCAATTTAATAAGCTCTTCAAATTTACCGCGACCTAAAAGTGGAGCCATTTTA
AATTTAAATGTATTACAGAATGATTCCATCATATAATCATCTACATAAGTCACATCACCGCTTTCTGTAG
TAACAATAATGTCAAATACATAAAAATCTTTATCACAATAATCAACATTCTTCTGAATGCCAGGTCCAGC
GAATTCGCCAAAGACTTGATAAGATACAACCGCTGAGGTTTCCATAATATCTTGTACAGCTTTAATGGAA
TCAGCATAATTCTTCAAAATAATTTCATACCCAAAGAAATCTTCAGCAGGAAGAATCGGTCCAGTGCGTT
TAGCGCAAGTCACTTTATCACGCTCAATAATCAATGAGAAATTTGTGCCGTGAATCTTTTCACGAGCTAC
CCACTCCCCACCAGTCAATCCCAAGCTATAAAGTTTTTCAATAAATTTAGAGTTGTAATGATTTTCAAGA
CTGCTATACTTTTTAAACATAATTAATCCTCAAAATGTAATTTCTAACCAATCACCATCACGCTGATCAC
TATTGACTTTAAAGCTGAATCCTTCTTTTCTCAGCCAATCACCAATTTCTTCTGTAATCAATTTATCACG
AGCAATACAATAATAATTAAAATGTGTTTTACCTTGTTCAGCTGCTTTATTAGCAAGTTCTGAAAAATCT
TTAATAAAACACTCTAGCTTAAACTGTTTACTTTTTAATGCTTTTTCGCGTAATTGATTAGCAAAAGATT
CATTTTCATAAAGATCATACTGTTCCATTTTTCACCTTTTTATTGATATGTCTTTTTCTATAGACAACTT
TTTCTCGAGCCCATAATACAGCCACTTCTTTTGCCTGTAAGTTTAATTCACGAGCAATTTCAATGAATGA
CTTTCCAGACTCATGAAGAGTAAACACCACAACCTCAGTTCTCATAATCAATCTCATGTTATCGAGTTGG
TGCCATTATATACATCATTTTCTGATTGTGTTTTGTGTGCTTTCAAAATGAAGAAAGGGGCCGAAGCCCC
TTATGATTATGGATAGGTATAGATGATACCAGTTTCTAAAGCAGTTTTATGAATGATGTATCCATTACGC
GATTCTTGGACATCAACTTCTGGATAGTCTTTCATCATCTTCTGGAGAGTGTAACGATGCAGGTAATATT
TACTATCTGGGTCGTCAGTTTTCCAATCTTTACCTTCTTCGGTCATTTTTTGGATTTCATCCATAACCCA
CCAACCGCACCAGATGTAAGCTGAGCTACGGTGTGGAAGAGGATGAACATAAGGTAATTCACCTTCTGGT
TCTGGAGCAACTTTAGCCGTGACTGTTACATTACCAGTTTTGGTAACGGTTACAGGGTTATAATCTGCAG
CAGTAACAGTTGCAGTAACTTCAATAGTTTGACTTCCAACAGATGAGGTATCGACAGTATATACGTTAGT
TGACCCTTCTACAGGAGAAGAATCTTTCTTCCATGAGTAAGTAATTTGTGCTTCTTCTGGAGCACCCGTA
ACATTAGCCGTAAATGTAGCCGAAGCATCTTGCTGAACATTAATAGAAGGAGGAGTCAATGTAACCTGTG
GATTCATTGTCTTCTTATTAACCGTTAATGATACTTCATTAGAAGTAACGCTTAGTGCATCATAATCTGT
CGCGGTTACTTGGGCTACGCATTTAATTCTTTTTACTCCACTTGTAGTTGGAGTATAGCTAAATGTAGAG
TTAGTTTCTCCACCAACTTGTGAATCATCTACATACCACTGATACGTAGCAGATGCTCCATCAGGTTGAG
AAGCTAAGGCAGCAGTAAATTGAACTGGGGTTCCAATCACTCCAGCCGCAGGACTAGCAGGAGTTACGGC
TAAGGTAGTCGTCTGTGTCTTATTTTTAACTGTGATAGTTGTTGTCGCTTCAGCCGTTTCCGGGCCTCCT
TCAGAAAGTGTATTTGTTGCAACTACTTTAATAGTCTTTTGACCGGCAGGTCCTTTTAGTACATAACTAA
AAGTTGCTTCAGCTCCATCTTGTGGAACATTATCTACGCTCCAAGCATATGTAATAGTTCCGCCTCCAGT
TTGACCACTGGGTGTAGCAGTAAACTGCTTAGTTTCATCAATAACCCCTGTAGGTGTTTTAGGAGTTATA
TCAACTGTAAAAGTCATAAGTTATCCTTATTTTAATGTTACGAAAGAAGAGTTGCGTGTTTCACGAATTA
AAACTGATCCATCGCGATTAATGTAATAAATTAAGCTAAATAAAGTTTGGTGTGCTGACGCATGTTCAAA
ACTAGTTGGGTGAGATTTCCAATCAGGAGTTTCAGCAATCCATTGATAAATCCACCAAGGAACAGTACAG
AATCCTAGATTTTTTCCAATCAGTTGAAGATTCGGACTAAAGTTTTCCGGAAGAGTAAATACAGACGGCT
TTTCAGATTCAATAATCTCAGCTACAGCCTGTTCGAATTTTTCTTCAACAAAAGGAGTATCTTCAATCAA
AACATCGGTATTTTCAGGAATTTTATCCGTTTCTACTACTTCAATTTTAATGTCAGATTTAATCGGAGAA
TCAATCAGAAGTGCTGCTTCTGGATTGACTTCTTCATCGTCATATTTTAATCCCTCTGCGGCATCAGCAG
CATCAATTAAGTCTTTAATAGATAACCCATCAGTCTCTGGCATAGGTTCACTAGCGAGCTTCTGGAGGGC
TTCTTCAATATCAACAACGATATTATCAAAAGATTTATTCTTTTTGACCTTTATACCAAACTGTTCAGCA
TATTCAGCTAATTTAGCTTTAGCTTCTTTGTTATCATCAAGAGCCTTCAGCTCTGCAATATAATCTTTAT
CTATCATAATATTTCCTCAGTATAAATATAGATATATTTATTACTCGGAAAATAGTATGTACCACTTTGT
ATATGAAACAACAAATCTAATAAATGGTAAAAAGTATATAGGAAAGCACTCTACTGATGACTTGAATGAT
GGTTACCTTGGTTCCGGTAAGGCAATTCAGCAGGCTATAAAGAAATATGGTGAAAACAATTTCTCTAGAA
CAATACTAAAAGAGTTTAAAACTTCCGAAGAAGCGTACATGTATGAAGAAGAAATTATAACTCCTGAACT
AATAAAAAGCAAAAATTATTATAATATGAAACCTGGTGGAATTGGTGGAATTGTTATGACTACAGATGTT
ATAGCAAAGATGAAAGAATCTTCCGCTAAAAGATTTGAAAACTCACCGGGCACGGTATTAGGTAAAACTT
GTTATACTAATGGAACTAAAAATATTTTTATTAAACCTGGAGAACTTGTTCCAGAAGGATTTGTAAAAGG
GATGGTTCATCCTAATAGAAAGTCCAGAAAAGGATGTAAAGTCAAACCGACTACCACAGGAACTTTTTGG
GTCAATAATGGCGCAATAAATAAATTAATACAACCAGACGGTATTATTCCCGACGGATTTATTAAAGGTC
GTCTCATGAAAAGAGATTCTAAAGGCAAATTTAGTAAGGCATAATTATGGATATTAAAGTACATTTTCAC
GACTTCAGTCATGTACGCATCGATTGTGAAGAGAGCACGTTCCACGAATTAAGAGATTTCTTTTCGTTTG
AGGCCGATGGATATAGATTTAATCCTCGCTTCAGATATGGCAACTGGGATGGACGAATCCGTCTTTTAGA
TTATAATCGTCTTCTTCCATTCGGCTTAGTCGGGCAAATTAAAAAATTCTGTGATAATTTTGGCTATAAA
GCCTGGATTGACCCACAAATTAACGAAAAAGAAGAATTATCAAGAAAAGATTTTGATGAATGGCTTTCTA
AATTAGAAATCTATTCAGGAAATAAAAGAATTGAACCGCACTGGTATCAAAAAGATGCAGTGTTCGAAGG
ATTAGTTAATCGTCGTAGAATTCTTAATCTTCCAACATCTGCAGGTAAATCTTTAATTCAAGCTTTGCTT
GCGCGATATTATTTGGAAAATTATGAAGGTAAAATTCTTATCATTGTTCCAACAACTGCTCTGACAACTC
AGATGGCTGATGACTTCGTCGACTATCGTTTATTCAGCCATGCAATGATAAAGAAAATTGGTGGCGGAGC
ATCAAAAGATGATAAATATAAAAATGATGCACCAGTCGTTGTTGGTACATGGCAAACTGTAGTAAAACAA
CCGAAAGAATGGTTCTCACAGTTTGGAATGATGATGAATGATGAATGCCATCTTGCTACAGGAAAAAGTA
TTTCATCTATCATATCAGGTTTAAATAACTGCATGTTCAAATTCGGTTTGTCTGGTTCATTACGTGATGG
CAAAGCCAATATCATGCAGTATGTTGGAATGTTTGGTGAAATATTTAAACCAGTAACGACTTCTAAATTA
ATGGAAGATGGACAAGTAACTGAGCTAAAAATTAATAGTATTTTTCTTCGCTATCCCGATGAGTTCACTA
CTAAATTAAAGGGAAAAACTTACCAAGAAGAAATAAAAATTATTACTGGGCTTAGTAAAAGAAATAAATG
GATCGCTAAATTAGCTATTAAGCTTGCGCAAAAAGATGAAAACGCTTTTGTCATGTTTAAACATGTATCG
CATGGTAAAGCTATTTTCGATTTAATTAAAAATGAATACGATAAAGTTTATTACGTATCAGGGGAAGTTG
ATACCGAAACCCGCAATATAATGAAAACCTTAGCTGAAAATGGTAAAGGAATAATTATAGTAGCTAGTTA
TGGTGTATTTTCTACTGGTATTTCAGTTAAAAATCTGCATCACGTTGTTTTAGCGCACGGTGTTAAATCA
AAAATCATTGTATTACAAACAATCGGTCGTGTATTACGTAAGCATGGTTCTAAGACAATAGCAACAGTCT
GGGACCTCATAGATAGCGCAGGCGTCAAGCCAAAATCTGCTAATACGAAAAAGAAATATGTTCATTTGAA
CTATCTTTTAAAACACGGCATTGATCGTATTCAGCGCTACGCAGATGAAAAATTTAATTACGTAATGAAA
ACAGTTAATTTAATAAGCTTCGGCCCTTTGGAGAAAAAGATGTTACTAGAATTTAAACAATTTCTTTATG
AAGCTTCTATTGATGAATTTATGGGTAAAATTGCCTCTTGTCAAACATTAGAAGGTTTAGAAGAACTTGA
AGCTTATTATAAGAAAAGAGTCAAAGAAACTGAATTAAAAGATACTGATGACATCTCTGTGAGAGATGCT
TTGGCAGGAAAAAGAGCTGAATTAGAAGATTCAGACGATGAAGTAGAAGAAAGCTTTTAAATTAAAAAAG
GCCCAACCAAAAAGGAAGGGCCAAAACTATAGACTAAAGGTCACACTATAGCAAAAGTTGTGTTTCATTT
AATTGTTCTTCCGAACTTTCTGAAACTGGTAGTTCTTTAATGTAATTATAGCAAGGCCCAGGATGTACAG
GACCTTTGTCTGTTTCAACAACCAATGCAGAATCGATTGGAGTTTTACAGACAACACAAATCTTATCTGA
CATGATTGTCTCCTCTGAATTATATCTATTTATACAACTCTCATATGCATATCAATGCCCATATCTTTAG
AATAAAAATATTCATCAAGATATCCGGCAAATTTTCCTTTAATATAAAGGACATCTTCACCACACGGGTG
GTCGGCCAGGATACGAATATCCTGACGCTTAAGATTATGCTTTTTCATTAAGAATTGAATTTCCGTTTCA
AATTCTTCTTCATAATTAAAAGCATCATCAATGCTATATCTCATTATTTTCCAGCCTCAAATGCTCGCAT
GTCTTGAATATGCTTAATAGCAAATCCACGTGATTTAATAGCATCAAGAGCTCCGCTACAGAAATCTAAT
AAAATCCCCCAATACTGCAACGAGGTATCAACCTTTAAAACATCCTTATCCGCTGATAGAACTGTCTTCA
TTTCTGATTTCTCGTAACGATCCATACTAAATTCATCACCATCTCCTCGTCCCGAGTAGTAGTCTAATCT
AGCTTTAAGAGCAACTTTTTTCTGTGCTTCAATTCTAAGCATTTCCTTTTTAATACTTGAATGCTTATTA
AGCCATTTACTATATAACATCACATTATTAGCTGCTTCATACTGTAATTTAGTCGAATCTATAAACACAT
CTTTCTTCAATTCTTCTTGAAGATCTTCTAATCTCATATTGTTCTCTATTCAATTGTTATTGGTTGTTAT
TGGATGGACTTAGATTCATTATACCACGTTTTAACGTGAAGCATTATACTCTATTACTGGAAGCCAGCTG
CAGTTTTATCTGCTCAATATCATCAGGATTATCGATGACCGAAAAGCGTATTTCTACTATCAGAGTATAA
TCGTCATAAACGGGTATCACATTAACTGCTAATTTATCAATACGTGGCTCATAGTTTCTTACTGCGCTTT
CGATATTGCGTTCAACCGTGTCAGCAGTAAGAGGAGTCATATTTTCAAAAAGCTGGTCTGATAAATCACA
TCCAAATTCAGGGTCAAACGGTCTTGAACCTTTTCTTGTTGTAATAATTCCCAAAAGACTGTTTTTAATT
GACCTTAATCCAAGCGATCTGGAAACGTCTTTGTTCCAATCCATTTTCATTTCCGGGTCAATATCAGAAT
AAAGCTTATTAATATTTGCCATTATAGTAACTCAAAGAACTCTTTGAGGCCTCTTATTACGTGAGCATGG
GTTTTTCCACACTCTGGACACTTAATTGGAACAGCCAAATAAACGGTAGGCTTTAAAAGCATATCTTTTA
TAGCTACAATATCTGACTCTGTGATGATAGAATATAAATCTTCTAGTTCCTTTTCATTTAAGTCTTCAAC
TGGAATGCTTTCCCCGTTAGCATGAATCGTTTCTATACATGATACTATCATGTGGGCTATATTTTTATCA
TCAAAAATTTTAGGGTATCGGAATTTAATTTTAATGTCACCTAGTGTATACCAGAGGTCTTCTGGTGCAT
CTATTTGTGTATGTAATAGATTTATATGGGTTGGTATTTCAGTTCCACAGGTGCACTTCCAGGAGTTTTC
GTGATTAACTTCACCGAGAGAATGTGCCCATAAATGAATCAACAATAGTTCTGATTCTTGGCGGTTTAAA
TCTTTTGCATTTGTGCAGTCTTTGATTAGCTTTTTAACAATTACTTCTACGGAACCATTATTTTTGGCAG
TAATAAGTTCTAGATATTCTTTAAGCGTGAATGCGCGACAATTGATTATTTTAGAACCAACTCTCACATC
AAATTTGTATTCATACATATTTAGCTCCTTTATTTATCATATTTATAAATAGAATAAAAGGAGCATCTAT
GGCAAACATTATTCGTTGTAAATTACCAGATGGTGTTCATCGTTTTAAACCATTTACGGTAGAAGATTAT
CGAGATTTTTTGTTAGTTCGAAACGATATAGAACATCGGTCACCACAAGAACAAAAGCAAATAATTACTG
ATTTAATTGATGATTATTTTGGAGACTATCCGAAGACTTGGCAACCATTTATATTTTTGCAGGTATTTGT
AGGGTCAATAGGTAAAACTAAAAGTACGGTCACATTTATATGTCCAAAATGTAAAAAAGAAAAGACAGTT
CCATTTGAAATATATCAAAAAGAATTAAAGGACCTTGTTTTTGATGTAGCTAATGTTAAAATTAAATTAA
AGTTTCCTTCTGAGTTTTATGAAAATAAAGCAAAGATGATTACTGAAAATATTCATTCTGTTCAAGTAGA
TGAAATATGGTATGATTGGAAGGAAATTAGCGAGTCCAGTCAAATAGAACTAGTTGACGCCATCGAGATA
GAAACATTAGAAAAAATTCTCGATGCAATGAATCCTATTAATTTAACTCTACACATGTCATGCTGTAATA
AGTACATTAAAAAATACACTGATATAGTAGACGTGTTTAAGCTATTAGTTAACCCAGATGAGATATTTAC
TTTTTATCAAATTAATCACACACTCGTAAAAAGTAATTATAGCTTAAATTCAATAAGTAAAATGATTCCT
GCCGAGCGCGGATTCGTATTAAAACTGATTGAGAAGGATAAACAATAATGAGTATGTTGCAACGCCCCGG
ATATCCAAATCTCAGCGTTAAATTATTTGATAGCTACGACGCTTGGAGTAATAATAGATTTGTTGAATTA
GCTGCTACTATTACCACATTAACTATGCGGGATTCTCTTTATGGCCGAAATGAAGGAATGCTGCAGTTTT
ATGATTCTAAAAACATCCATACAAAAATGGATGGAAATGAAATAATTCAGATTTCTGTAGCTAATGCAAA
TGATATTAATAATGTTAAAACACGAATTTATGGATGTAAGCATTTTTCCGTGTCAGTAGATTCAAAAGGT
GATAACATCATTGCTATTGAATTGGGAACTATTCATTCTATAGAAAATCTTAAATTTGGTAGACCATTTT
TCCCTGATGCAGGTGAATCTATAAAAGAAATGCTTGGTGTCATTTATCAGGATCGCACATTATTAACTCC
AGCAATAAATGCTATAAATGCTTATGTTCCTGATATTCCATGGACTAGCACATTTGAAAACTATTTGTCA
TATGTAAGAGAAGTTGCTCTAGCTGTAGGAAGCGACAAATTTGTATTTGTATGGCAAGACATCATGGGCG
TTAACATGATGGACTATGATATGATGATAAATCAAGAACCATATCCAATGATTGTCGGTGAGCCATCTTT
AATAGGTCAATTCATCCAAGAATTAAAATATCCATTAGCATATGATTTCGTTTGGTTGACTAAATCGAAT
CCTCACAAACGTGACCCAATGAAAAACGCTACTATCTATGCGCATTCATTTTTAGATTCTTCAATACCAA
TGATTACTACAGGAAAGGGTGAAAACTCTATTGTGGTGTCAAGGTCAGGTGCTTATTCTGAAATGACTTA
TAGGAATGGATATGAAGAAGCTATTCGTCTTCAAACTATGGCACAATATGACGGCTATGCTAAATGTTCT
ACTATCGGTAATTTTAACTTGACTCCTGGTGTTAAAATTATTTTTAATGATAGTAAAAACCAATTTAAAA
CAGAATTTTACGTTGATGAAGTTATCCATGAATTATCCAATAATAATTCAGTAACTCATCTATATATGTT
CACTAATGCAACGAAACTGGAAACAATAGACCCAGTTAAGGTTAAAAATGAATTTAAATCTGATACTACC
ACTGAAGAAAGTAGTTCTTCCAATAAGCAATAAAGAAGTTTCTATTCCTAAAATGGGTCTTAAACATTAT
AACATTTTAAAAGATGTTAAAGGTCCTGATGAAAATTTAAAACTTCTCATTGATTCTATTTGTCCGAATT
TATCACCGGCAGAAGTTGATTTCGTTTCTATTCATTTATTGGAATTTAATGGAAAGATTAAATCTCGTAA
AGAAATAGATGGTTATACTTATGACATTAATGATGTTTATGTATGCCAAAGATTGGAATTTCAATACCAA
GGAAATACATTTTATTTTAGACCTCCTGGAAAATTTGAACAATTTTTAACGGTGAGCGATATGTTATCTA
AATGCTTACTTAGGGTCAACGATGAAGTTAAAGAAATTAATTTTCTTGAGATGCCAGCATTCGTTTTAAA
ATGGGCAAATGATATTTTTACAACTTTAGCAATTCCTGGCCCTAATGGTCCAATAACTGGAATTGGCAAT
ATTATTGGATTATTTGAATGAAAAAGCCACAAGAAATGCAAACGATGCGTAGAAAAGTTATTTCAGATAA
TAAACCAACACAGGAAGCGGCTAAATCCGCTTCTAATACTTTATCTGGGCTTAATGACATATCTACGAAA
TTGGATGATGCTCAAGCTGCTTCTGAATTAATAGCTCAAACTGTCGAAGAAAAATCGAATGAAATAATTG
GAGCAATTGACAATGTAGAAAGCGCAGTGAGTGATACATCTGCCGGTTCTGAGTTAATTGCTGAAACTGT
CGAAATTGGCAACAATATTAATAAAGAAATCGGTGAATCGCTCGGAAGCAAATTAGATAAATTAACAAGT
TTACTAGAGCAAAAAATCCAGACAGCTGGAATTCAACAGACTGGAACTAGTTTAGCTACGGTTGAAAGCG
CTATTCCTGTTAAAGTCGTTGAGGATGATACTGCTGAATCTGTGGGTCCTTTATTACCAGCTCCTGAAGC
AGTTAATAATGATCCTGACGCTGATTTTTTCCCTACCCCTCAGCCAGTTGAGCCAAAGCAAGAATCACCA
GAAGAAAAACAGAAAAAAGAAGCATTTAACTTAAAATTATCTCAAGCTTTAGATAAATTAACGAAGACTG
TTGATTTTGGATTTAAAAAATCCATTTCAATTACTGATAAAATATCAAGCATGCTATTTAAGTACACCGT
CAGTGCTGCTATTGAAGCTGCTAAAATGACTGCAATGATATTGGCTGTTGTTGTTGGAATAGACCTTTTG
ATGATTCACTTTAAATACTGGTCAGATAAATTTTCAAAAGCCTGGGATTTGTTTAGTACAGACTTTACCA
AATTCTCTAGCGAAACCGGAACTTGGGGTCCTTTATTACAGAGCATCTTTGATTCTATTGATAAAATTAA
ACAACTTTGGGAAGCGGGAGATTGGGGTGGATTGACAGTAGCTATTGTTGAAGGGCTTGGAAAGGTTCTT
TTTAATTTAGGTGAACTTATTCAATTAGGTATGGCTAAATTATCTGCAGCAATTCTTCGAGTCATTCCTG
GTATGAAGGATACTGCTGATGAAGTAGAAGGAAGAGCATTAGAAAATTTCCAAAATTCTACTGGAGCATC
TCTCAATAAAGAAGACCAAGAAAAAGTAGCAAATTATCAAGATAAACGAATGAATGGAGACCTTGGCCCA
ATAGCAGAAGGACTAGACAAAATCTCTAACTGGAAAACTCGTGCATCTAACTGGATTCGTGGTGTAGATA
ATAAAGAAGCGCTGACTACCGACGAAGAGCGTGCGGCAGAAGAAGAAAAATTAAAGCAACTTTCACCGGA
AGAAAGAAAAAATGCTTTAATGAAGGCTAATGAAGCTCGTGCTGCGATGATTCGTTTTGAAAAATATGCC
GATTCAGCTGATATGAGTAAAGACTCAACGGTTAAATCAGTTGAAGCTGCCTATGAAGACCTTAAAAAAC
GGATGGATGACCCGGATTTAAATAATTCACCGGCAGTTAAAAAAGAACTTGCTGCTAGATTTTCTAAAAT
TGATGCTACTTATCAAGAGCTCAAGAAAAATCAGCCTAATGCCAAACCTGAAACTTCTGCTAAATCACCA
GAAGCGAAACAAGTCCAGGTGATTGAAAAGAACAAAGCACAGCAAGCTCCTGTTCAACAAGCATCTCCTT
CGATCAATAATACTAATAATGTTATTAAGAAAAATACTGTCGTTCATAATATGACACCTGTAACGAGCAC
GACTGCTCCTGGTGTATTTGATGCGACTGGAGTTAATTAAGGAATAATATGGCAATTGTTAAAGAAATAA
CTGCTGATTTAATTAAAAAGTCCGGTGAGAAAATTTCAGCCGGACAGAGTACTAAATCAGAAGTAGGAAC
TAAAACATACACAGCCCAGTTTCCAACTGGGCGTGCTAGTGGTAATGACACTACAGAGGACTTCCAGGTA
ACAGATCTATATAAGAATGGATTATTATTTACTGCATACAATATGTCATCTAGGGATTCTGGAAGTCTTA
GATCGATGAGATCTAACTACTCTTCTTCATCTTCGAGTATTTTACGTACAGCTAGAAACACTATTAGTAG
TACAGTATCAAAACTATCAAATGGATTAATATCAAATAATAATTCAGGAACAATAAGTAAATCTCCTATC
GCAAACATTCTTTTACCGAGATCTAAATCTGATGTTGATACATCATCACATAGATTTAATGATGTTCAAG
AAAGCCTTATCAGTAGAGGCGGAGGTACTGCTACTGGTGTGCTAAGTAATATTGCTTCAACCGCAGTATT
TGGGGCACTGGAAAGTATAACACAAGGTATAATGGCTGATAATAATGAACAGATTTATACGACAGCCAGA
AGTATGTATGGTGGTGCTGAAAATAGAACTAAAGTGTTTACATGGGATTTGACTCCACGTTCAACAGAAG
ATTTAATGGCTATTATTAATATCTATCAATATTTTAACTATTTTTCTTATGGTGAAACGGGTAAATCTCA
ATATGCTGCTGAAATAAAGGGGTATTTAGATGATTGGTATCGTTCTACGTTAATTGAACCTTTATCTCCG
GAAGACGCAGCTAAAAATAAAACACTATTTGAGAAAATGACATCGAGTTTAACTAACGTTCTAGTAGTTT
CAAACCCGACAGTTTGGATGGTGAAAAACTTTGGCGCAACATCTAAGTTTGATGGAAAAACGGAAATATT
TGGTCCATGTCAAATACAGAGCATTAGATTTGATAAAACACCTAATGGTAACTTTAACGGATTAGCTATT
GCTCCAAACCTCCCTAGTACATTTACTCTCGAGATTACTATGAGAGAAATTATCACGTTAAACCGTGCTT
CTTTATATGCGGGGACTTTTTAATGTATTCTTTAGAGGAATTTAATAATCAAGCAATAAACGCAGATTTC
CAACGTAATAATATGTTTAGCTGCGTTTTTGCGACAACTCCATCAACTAAAAGCTCTTCGTTGATAAGTT
CAATTAGCAACTTTTCTTATAATAACTTGGGCCTAAATTCAGATTGGTTAGGATTAACTCAAGGTGATAT
TAATCAGGGAATTACCACGCTAATTACAGCTGGCACACAAAAACTGATAAGAAAATCAGGAGTCAGTAAA
TATCTTATTGGTGCCATGAGTCAACGTACAGTTCAAAGTTTATTAGGCTCATTTACAGTTGGTACATATT
TAATTGACTTCTTTAACATGGCATATAACTCATCTGGATTGATGATATACTCTGTAAAAATGCCAGAGAA
TAGATTATCCTATGAAACTGACTGGAACTATAATTCTCCTAATATTCGTATAACCGGAAGAGAATTAGAC
CCTTTGGTTATTTCATTTAGAATGGATTCAGAAGCTTGTAACTATCGTGCAATGCAAGACTGGGTTAACT
CCGTTCAAGACCCAGTAACTGGACTGCGTGCTTTGCCACAAGATGTCGAGGCAGATATTCAGGTTAATCT
TCATTCTCGCAATGGATTACCTCATACTGCGGTGATGTTCACGATGCATTCAATATCAGTGAGCGCTCCT
GAGTTATCATATGATGGAGATAACCAAATAACTACATTTGATGTTACTTTTGCGTACAGAGTGATGCAGG
CTGGAGCAGTTGATAGGCAACGTGCGCTTGAATGGCTTGAATCTGCTGCTATAAATGGTATTCAAAGCGT
TCTCGGAAATAGTGGAGGTGTTACTGGACTATCTAATTCGCTTTCACGACTTAGTAGATTAGGGGGAACT
GCAGGAAGCATTTCAAACATTAATACTATGACAGGAATTGTCAATTCGCAGAGTAAAATATTAGGAGCAA
TATAACAATGGGGACCGAAAGGTCCATATTTTTATTTACGGAATGAAATGAAAGCAGCAACTGAAGCAAC
TAAACTGTCTTCAATATAAACTTCAATTTTTACAGGAGCTTCTGACTCAAATTTACCTGTTACTACACCC
TGAAAAATACTTTCAGTCTGTTCTGGCTTTGAAAAATTTTCAGAAGGAAAAATTCCGAACTTTTTATCTG
TTCCAAAAATTTTGATAAATTCATCGTAAACCGCTTCGTTAAAAGCATTATCAGCAGGAATAACGCCTTC
AACTACAAGTTCTTGACCTAAAAAGCGTAAAGAAGATTTCATTTTGTGTTCCTCATGTTATGTTAGTAAG
ACTACTATAACACAACACGAGGGACTTGTAAACTACATTTTGAACTTTTTAGTACGCGTAATAGGCATGC
GTCGATTTTATACTGTTTCATTGTTTGAAGAGCAGTATCAAAAACAGCATTAATGACACCAATTGGATTT
CCACCCAAGTTTTTAAGCTTAACTAATGATAGTTTCTCATTAACACCTATCATTACGATATGCATCATTT
TATCGCCTGGTTTAACGTTTTATTTGTATCACCGCCAGAGGTGTATGTACAAAATCTAAATCCAGGAAGT
ACACTTTCTTCACCGGCTTGAATAGCAAAAATTTGTGGTATTTTATGCTTAGGATTTAATGTAACAACCG
GCGCCGAAGCGCCGTCAAATAATTCTGTAATAAGTTCCATGATTTATCCTTGAACGAACTTGTAAGGCAT
GTTTGCAATATCTATGCAAGACGCAATAATTCCAAGAGATGATTCTACTTTCTGTTTAACATTTGATGAA
ACAAATGATGCAAAGTCAACTCTATCTTCTATATCACCTGTCATTGTAACCAATTCACCAGTTTCCATTA
AATGGTCTCCGTCATAGATTACCGATTCGGTGAGTTCTTCTGTGGTCATAACTTCAGCTTGAATAAGCTT
GTTGTTAGTTTTAACTGTTCCATCATTGTAAGATGCATCGGTTATTTTATTAACTTTGACCATTAATCCA
CGTGGCAAAATGACTTCCATTTCATTTGAAGGCGCTAAACTTCCACCGGGTAAAACAACATTGACCTTAT
CAGCCCCAGTAATAACCCATCCAATTCCAACTAAATTATCGCTAGAATTTACAAGTCCTTCATCAGTTTT
ATCAATAGAAACGCTTAAACGCTTTTCGTCTGGTAAAACACCTATAGATGAATCAGTCATCCAAGTACCA
AAAATATTTGGATATAATGATGTTGACACAAAGTTTCTAAAATAAAAAACTCGATTTTTTACCATTGCTT
CGTATATTGAAGGTAACATTCGTTGTGAACGATACAAAGTAATACCTTTTGGTAATCGTTCACCATTTTT
AAAGGCTGAATCTAAATTATCAATAGCTTTTTCTATGTCAGATGCTGTCAAAATACTTGTACGCTCATCT
GGATTATATAATCCCAAAAGAGCATTATTTATGTCTACATATCCTGAACCTACGTATTCACGAATTCCGC
GTTTTTGCGCTGGTGTGTATTTAGATGAATCTTTATTTTCGACTATAGGATGTAATGACCATCCAGCGGT
AAGAGCATATCCACGTAATTCTCTTCGAATAATCTTTGTTTTTATTGCATTCCAAGAATTTTGTACTAAC
TCATTTGCAGCATCTTGGTTTAAATGCGAATGTTTGTTAATATTTCTTTCAAACCAAGCACCCTTATATT
TTTCTAAAGTATCATCGACGATAGAAGCAATAGTTTCTAAGGTTTTTATTGAAGTAATAGATTCTTTTCG
TAATCTTTCTAAAGCTTTATTTTTTATTTCTGCGTTAATAATGGATTCTTTATCTTCAGGAATTATAGAA
GCTTCTCTGAATGCCATCCCAGCTGTAACACTGCTAAGAGCATTCTCTAGTGCAAATCCTGAAGTAGAAA
TTACCGTTAATTCATTAGAATCAGAAATTAAAGGCGCGTCCGCTGGTTTATTTAATTCGGCCGCTGAAGC
CTCAAATTTTTGAAACATTGGTGTTTCAAATCTAGAAGATTCCAATGACTGACTTTGCGCAATTGCTCTA
CGGGAAATTTTAACTTTAACGATTACAGCTTGGTCAGAACGTTTATCATTTTCTTGCGCAATAGATGCTG
CAATTGCCTCATTTTTAGTTACTTGAGCCCCAGTATCTTTATTGATATAAACATCACCGACCTTCGATTC
AACTTTAGTAAAGAGCTCGGTACTAATTTCCGGAACTCCTGGAATGTCTTCTAGTGATACATTTTTGCGA
TGTATAAGAATATATGCATACTTTTTATCGTAATCCCAGAGTTCCTTAAGAAGGACGTATCTACCACCTG
AACGACTACGGATAAGTCTATCAGCAATAACTTGAATTTGTCGAGCTTGGCCAGCAGTTTTAGACTTAAG
AATACGGAGCATACAGGCATCAATTTTATACTGGCGCATTGTTTGCATTGCAACAGTAAAAACTGAATTG
ATATAATTAATTGGGCTTGGACCAAGACCTTTTAATTTAGCAATTGAACCTTTAGCAGTTAATGTAAAAG
GAACAATATGCATCATTTTATCGCCCATCTTTAAATCACGATTAGTATCACCTCCAGATGTATAGGTACA
TAAACGAAAGCCTGGTTGTTCAATTGCATCATCAACATGAACTGAAAAAATTTGCGGTATTTTCTTCTTT
GGATATAAGTTTGTAATTGGAAGAGTAGTATCTTCGTCAAATAATTCTGTAATAAGTTCCATCATATCCT
CTCTAGTGTTTATTCTATTCTATTTATAAAATTAAAGGCCCGAAGGCCTTTAATAATCTATTGGTAAGAG
AGTACGATATATTTCAAACTTTGGACCTTTTTCATAAGCATCAAATGTTTCTGTGAATTTATTATAAGCA
TATGCATCTATAAATTCAATCATGATTTGTGATACAGAAGTAGAAACATCTCCACCTTCTTTTTGAGCCA
CGACAATTGTTTCTAAGTAAGCTTTCATAGACCAGTTACCTCATGAAAATCACCAAATACATCTTCGAAT
GTATTAGCTTTAGTTTTATCTTCACGTAAACGAATCGCAATCGGAAGAAATAATTTAACGTAATCAGTGC
GGCCATCAGATTTTAACCAACCGTTGCATTCGCACTCTAGAATTTTTCCAATATAATAATTTTGGTTTTC
CATAATGCGAGTACGGTCAAGTTCATGCGATTTTACACCGGCTTTATCTTTTAAGCCTGAACCAGCATTT
ACCTTAATTTTTCCACACTCTGACTCAAGAATAAATCCACCCGCTTTAGTAGGGTCTTTACGGTGAGGAT
AAATTCCTACAATTTTTAAATCAACATCAATTACTTCTTTAAATTTATAAAGATTTTTTGAACGAGCATT
TTCCCATAATCCATCGATATTTTTGAGAATAATACCTTCAAGACCTTGGTCAATATACTTTTTATAAATT
ACCTTAGCTTCATCTAGGTTATTTACTACCTGGTTTTCAATTAAAATTACTTTATCATATCCAGATGTCA
TTTGTTCTAGTTTAGAAAAACGTACATCATATTTCAAACGAAATGCAGGAAGACTGTATATTTCTACCAA
CGGGACATAATCCCAGACCTGAAACTTCATGCATTGTGCTTCTTTTTCAGAAATGGTTCCCTTTAAAGAT
TTATTGGCGATTCCATTAGAAGCAGTACGTGATTCAGCTACTTCGGCGAATTCTTTAGCTTTACTGTTTT
CAGGATAAGCATCAAAAAGAAAATCTAGGCCTTCTGGCTCCTTTTTAACTTGCTCATGGTATACCAATTC
GCCATCAATCAACACACCTTCTGGATGAATCTGGCGGGCTTCAGCGGTCATTTTAATTAACTCTTCCTTA
AGAAGATCTAATCCTAGATATTCATTACCAGCTCGTGATAAAAGACGAACATCATCTAATTCATCACCTC
TAACTTCAGCAAAACACCGAGCTCCATCAGCTTTTAACTGAGCAAAGGCTGGAAATTTGATATTCTTATT
AATGCCTTTTTCATCATAAGAACTTGCGAGCATTTGAGGTTGTTCAGGAATTAAACCTGGCCAAACTTTG
TTTGCAATAGATACTGAAGCACCACATTCAAGGTCTCGCATCATCACTCGACGCAAAACTTCAACATCAT
CTTTTTTACCATCGGTGATATATCCAGTTAATTCCTCAATTGCTGCATTTCCAGTCAATTTCCGAGTAGC
TAATGTGAATTCAATGAAGTCAAGCATATCGGTAAGAGTCAACATTCCAAAACTCTGGGTAGCAATACCA
GGTTTAGGCCATTTCTTGATATAATACTGTAACCCACGAGAATAAGTCAGACGATATACTCGTTTAAGCA
ATTCATTATCTTTATTCTTTTCAAGAATTGCTTGCTTCTGTTTAGTTGAACCAATAGATGCTATTTCGTT
CAGAATTTTAAGAATCATTGTTCATCCTTTAGAGTTTGGTTTACAGCTCTATTATAAATCAATTCATCAT
TAAGCTCAGTCAAAGACCTGTGGTACGTGGTTCTAACTTTATTTCCTTGCATCCAGTGCTTGATATAAAT
GAAACCTTGCTCTACACATTTTTTAAAAATTCGTTCGTCTTTTTGAGCTCGGAATTCTGGATTGCATCTA
AAAAATTGATTTACGTGACCGTAATCACGTGTAGTATTACCTTCATTTTCATAAATAGTGTGAACAACAA
ACATTAGAATGCTCCTTGGAAAATATTATCACCACAAGTAGGTCTATTATACAAATACTCTATACCGCCG
GGCTTAATATAGTTCCATGTCTGAAACGGATGCGTCTGATATGGATGATATGGATTATAAGGATTAAATC
CAGGAGTTCTCCAGGTAGTGTTCCAAGGAAAAGAATCGTTTTTAATCATCTTTTCAATTACATCTTTTAT
AGCTTTTTCACTATCAAAACTTTCTTTATTTTCCTTTGGTGAAAAAAGCTTATTCTCTACATCGTTCCAT
GTATAAACTCGCTGAGCAGTTTTTGGAATATTGTCACGCTCTCCTCGAGCCATCCAATACACAGGAACAC
GTAATATTTCACTCGCGTGATCGCAGTGGTGAGCGAGATCGTCAATATAACAAATTACGTTATATTTCTC
TTTTGCTTTTTTGAACAACTCTTCTTTTGAAGAATCATGACTACACATCAGTACTTCTGAGAAAGCACCA
GGAAAAAGAGCATTCAAATTAAATTGACGATTTAATAGAGCGTCAATAGAATCACCCAATGCTGTAACAG
CAACAAAATTATAATCTTCTTTTAATTTGTTAATTACACACAGAGCATCTTTATATGGAGACAAGTAACG
AATAAAATCCGAACGATTGTATTTTTCAATTAACTTGACGCCAAGTTCTTCATCACAGTTAAAGAGTTTA
CCAGGAGAAATAAATTTCTCATCTTGGATCATTTTTAAAATATGTTCTAACGGAAGATTATATTTCTGAG
CAAAATAAGGAAGGCCTGATTGCCAGCTTAAACATACTCCATCAATATCAGTTAAAATAGTAGGCTTCAT
AGAGAGTCTCTTAATAGGTTTAACACATCAATAAATTCAGCTTCGGTTAGTATTGTATCATCTTTTGTTA
GACCACTAGCAATGCTGTGCTTCAAAACTTTTCCTTTCGAGGCTTGTAATGCATCACGAAAGCCCTTGTT
TTGAATCGCTGCTTCAAAATATGCATTTGTGTATAATTCTTTCCACGCCGGGGAGTATCTTGAAAACGGA
ACTCCAAGCCAAAAGAGGGTCCCACGGTCCTGAGCTCTAGCATAAGACCTTCCAGCTTGTTGGGCGGCAA
GCCCGGATAACCCAAATATACGACGTTGTTGTTCAACATTTTTCACCTTACACCCTTGGAGGAATCCTTC
AAGACCTCCAAATTGAATACCATCCATAACGAAAGGCCATTGGGCGAAATTACTTAATGCACATGATGGC
CACCTAAAATTGCTTCTAATCTCTAACTCAGACATTTTCAATGCTTATAATTTCAACATCAGCCCAATGA
CCATAGCAAGGAAGACGAAATTCAACTGGCCAGTTAGGGTCCCTTTCTAATATAATAGACTCAACTTGTG
GTTCTTCGTGTTCATCAGTATACGGATTTTTATCTGTTACTTTATATGTGACCTTAATGTACTGAATTCC
AAAAATCTTATTAATTATATTCATACTAATTCCTTTAATCCGTAGATAGGAGATAATTCATCACCCATAC
GAAGGTCTTCATTTCCATCTACCCAGGAAACAATATAAGCCTCTTTTATTTGAATACCACTCCATTTAAA
TGGAGGTAGAACCTTAGAAATTAATCCAGGTATACCAACTCCCTTTAATTCAACAGTTTGACCTAAAAAG
AATTTCATTAGAACCTCATCTGAAAACCGTGCGATTTAACATTACCGCCGCCAATATCAGAAATGTTAAT
TTCACGCGCAATTGAAGGGTCAATGTCAATTTCACGATTGAGTTTAGTGATAGCTAAAGTATCACGCCCA
TTTACAGTACGGAACTCTAAAGGACAAACCACATCAACGTAGTTTTTAATCGATTCGCTAGTAAGTTGCA
AATGTGCAGGAAGGTCTTTAGGTGCCTTTGAGAAAACCACTTCACAGAAATTTTTGCGGGTATCAAAATA
AGTAGTCATAAACATAATATTTTCCTCAGTAAGGGGCTGAAGCCCCTCATTTTATTTTAAATATCAAATT
CATTAAGAACTACATCAAAGATTGCTTCAAGATGCTCAGGTTTAGCTCTGTTACTCAGAATATGACGAAT
CCAAGTTTTAACTAAGAGTTTACGATTAGCACCATTCCAGCAAGGATGAGTCCCTAAATCGCGTTGGCGG
AAATCATCATCCAGAGCGATTTTGAAGTTGGAACCTTTCATCGTGATTGAAACCGTGATACCGTTTTCAA
ATCGCATATAAACGTAGTTAGGAGTCATATACTGTTCAATTTCGCATACTGATCCATTTTGATGTTTCCA
GAGGCAAATAGTATCAATAGAACCTGCAATACCATTAGAAACATATTTACGTTCAAAGTTAATGTAGTTC
ATTTTTATTCTCCGAGATGTTTAATTGCGGTACAGGTATATAATATCATATCCTGTACCAAAGTAAACAA
TTATTTTACTACTTTCCAATGCTGCATGTCAAGTTTACCAACTTTTTTCATCTTCTCAATTAAGCGTTCT
GCACGTTGGCGAGCTGTAACATAATGCCATTCGCCTAATTCATTTTGTTCAATTTTTCCAACGATTACTG
TATTCAATTCATAAATCCAACCAGTAAAGAAATTATGAACTTGAATTGTAAAGGTGAAATCTGTTCCCAT
ACCTTCTGTTGTTTCTACTTCAATAATATCACCTTCAACTGCCATTAAGAACCACATAGTTTCATCATAT
TTACCATTGAAGCATTTAGTTTTAACTGCAGCGTTCAGATTAATCGTTTTCATTTTATTCTCCTTTGTTT
GTGTAAGATAATACTATCACAAAGGAACTATACTGTAAACAACTTTGTGCAATCTTTGGAAAATAAAAAA
GGACTCCCGAAGGAGTCCTCAACTTATGCTTTCTGCTTACCAAAACGAGAAGCATCATCTCGAAGAACCG
CACGTGCTCGGCGCATGATCTTCTCAACAGTTTGATTGATACGAGAGTTCGACCCACGCTTGTAGCCAGC
GCGTTTAGAATCACCAACTTTCTTTTCAACTGCTTTCTTTGCTTTAGCTTGTTTTGCCATTATAAATTCT
CTTTTAAATGAAAATGCAGGACTTATTGGCATTGCCTGCGCAAGCCCTCAAGGGGAACATAGGTTTTTGG
ATATTTAACGACCAGGATAACCATAAACCCGTCATCATTCACATTCAAGAGGTACACCGTAAAACTGTCG
GGGTCTTAAAACTATAATGATTCGCAAATCATTAATCAGACAGTTCGACGGCTCCTCGATTTAGCTCACA
CTAAGGCAGTGAATCTCCAATAAATTACTTCAGTGTTACCACAAAGTGACGAACTGCTTTTCGTGCAGCA
GAAGCCAGAGGCTTAGCATATTTAAGTTCATCTTTTTCCTGAAGCTCAGCAGCTAATGCAGTTTGAGCAG
GATTCAGATGTTTGAAATAACGCAGGATTTCAAGAGCTTCGGCTTCAACATCAATAGATGCGCCATAGTT
TTCGTGACCATTATTCCATGCGTTTCGTTGCAGTTCAAGAGCGTGTTGTAATTGTTTAATCATTTAAAAA
TTCTCGTTAGAGATTAAAACTCGGTAGTCACGTTCTTCTGAATTTCATCTTCTTTCGACAGATCTCTCAG
TTGTAGACTACCACATAGAATTGTTCGGTTAACTTATTATTCCGACACCCAATTCATATTATTATTTATA
TCACTTATAAAGACACGGAATAGCTTTATAGTGACAGGTAACGAATTTTTGTTTAATTTCTTTTGGCTGC
TTAAGACCCAGAGCTACAAAAGGATGCGGAACATTTCGAATTTGACCAACTGGAAGAGAAGTCAAATCAC
CAACTTCGCAGAAACCTTCAGGAACATCAGGACCGACAGAGTGAACTACACACAGTTCAGGAACTTCACC
TTGAACACGTTTACCGATAATAAGTCCTGATTCTGTAACTTCTTCATCACCGGCTTGTGCAGGTTCAGAA
ACTAAAATAACATATTCACCGACAGCACGAATTGGTAGCTGTTGTACTTCAGACATCGTTTTTCCTTTTT
GTTAACAGATGAATTAATAATAACAAATAGTTCTTAAAGCATTTATTTACCAATAAATTGAAGCAAATGC
TCAACTTTCATACCATTAACGGAAATCAATTTGTCAATAGAAAAACCTCGCCACGCACCAAGCTCAACAT
CAAATACTGGAATCATGTCAGTAGATTCTTTCCGAGTAGATTCAGTCAATTTGCCAGTTTGCATGGTTGG
CATAAAGTCTGCATCACGAGTACCTTTCATAGTACGAATAGTACCATCAGACTTTTCAAAAACTACGTTT
GAAACACCCATGGACAATTTAGTTTTCAAAATTTCACGAATTGCTACTTTCTGCTCAGTTGTCAGTTTCA
TTTATTTACCTATTACAGTTTTAATATGAGTTGTTCCACGTTCTTTAAGGGTGGAAAGTAATTTTTGGCA
TTTTTCTAAATCAGATTTCCAACTATATGGTCTATCAATACAAACCCAATTTGTCTTATAATACTGTTTC
CATTTAGAGAAAAAATATTTCTTATACTCTACAGCAAATGAGATGTTCTCGTTAGAATAAGAACTAATTG
CTGTGAGTTTTACCAAACGAAATTTCATTATTCACCACAGAATTCGTTGATATTTTCCCAGTTTAACTTA
TTCAAGTTTTTCTTAGGAACATTAAACACTTCAATACCTGCATTTCGCAGAATATCATCCCAACCGGGTT
TATTTTTGTCGTATGTTTCACAATAAACCAGCTTTTTAATACCAGATTGAGCTATCGCTTTTGCGCAATC
TGGACAAGGAGAAAGTGTTACATACATAGTAGCACCTTCAATAGAAGAACCATTTCGTGCAGCAAACAAA
ATTGCATTTAGTTCAGCATGAATTTCATTTTTAGATGACCATTCCGAGTGAGCACTACGATGTTCTTTCG
CCAAAACAAAACGATCAGTTGAACCAAATGATACGCATTCAGGCTTATGACCTTGAATGATAGCATGTTT
AGGCTTATTCAACAACCATCCTTGCTCAGCAGCATAATCACAACAGTTCACACCCCCTGCGGGTGAACCA
TTATACCCAGTAGAAATAATACGTCCATTCTTTTCAATTACTGCTCCTACCTTCCAGGAGCAACATTTTG
ATTCCTGCGATACTAAATATGCAATTTGAAGTACTGTACTCGCTTTCATTTCATAATCACCAGATAAGCA
GATTTAGCAGTTTCAACACGATAAATTTCGTGACGAAGTTTAGTTATACTTTTAATAACAGAACTAATTA
TATTCTGCCCATCTTTAAAGCGGTTTTTCTTATCAATAAAAACTGCGCCAGTCATCTTTTTGTGAAGCTC
AACTGGATACTTCGTCACAATAATAGCATCATACACAGAAGGATGAATACTATTCACCAGAGTATCATTC
ATTAAAGTTATTCTAATGAACTGTGCTGTTTCAGAATCAAGCGCTCTATGATCGCCAGTATCATTTTCAA
GACAATTATCAATTATATCAGTTAAATTCATCATAGTACGCCATACACCCTTTGTGCTTCAACTAATCCA
TCAAAATCCAGTTTAAGATGCGATATTTGATCGCCATCACCTGGATTCACAATTACTAATACTGAACGAG
GAGTTTCGGTAATAACACGAACCGATGTTTCAGGAAATCGTTCAGAAACCTTATTTACTAATTCCTGCGC
AAATAGTTTAACTTTTTCTTGGAATTCCTTTAACAGTAATCGGTTTTTCACTTAGCAACATTTTGTTTTC
CTCATTTGTTTTGGTAGAGCTATAATATCACAACTCTACCGTAAAGTAAACCATTAAATCGCTTTGAATT
CCGCAGTTTGAGATTCAAAGCGAATATCGCCTTTGATAACAAGCTCAGCATCAAGACCAAATACGACAAT
GATATGCGCGGAACCTGGATACAGTGTAATGGCAATAGAATCCACCTGGTCTGGAAGCAAAGTGTTCAAT
ACATGAGTCACTTGAGCATGGATTCGAAGCTCAGCTGCGTTATCAAGTTTTTCAAACATATTATTAGCGA
TAATTTGGCTAAACACTACTTCTACGATTTTAGAGTAAGTCGGAAACATATTTACCTCACATAATTTTCT
TCAAGCCAATCAATAACATCCAACGCATTATCAAAAGTTGAACCATCTACTCTGTCTTCTGTTTCATAAT
CAAGAACATCTAGGCCTACTCTTCCGTCAACAATAGGCCATAGACAAAATAGATATTTCTTTTCTTTTTC
AATTTTATCACAAAGACGATAAATCTTTTCTAGGTTATTCATAAGTTTTCCATGGTAAAGGCAGTTTAGT
TTTCTTTACTACTAGTTCAACATCGGGATTCTTTTCTCTTAATTTAAGACATTCCTCCCATGCTCTATTT
TCACTAGTAAATACACAAAATTGCCCATTACTAGTACCAACTAAACCGCTATTTACAATAACAATAGCCC
AAGTTTCATGGTGCCAAGCCATTAAAAATCTCCCGAAGCGACTTGCCAGCATTCAACACCGATACGACGC
CACATTTCAACTACTTGAGTTCGGTCATCAATAGCTAATTTCACGTCAAAATGCGGTGCAATGTGTTTCC
AGAAAATTTCTTCTTTAACTACATCGTCTTTACGGGTATCGCCTTGTTCGCGCTGACATTGCATAACTAA
TGGAACGCCAGCAATGTCCTCAACCCATTTACGGGTCATACGATAATATTTCGTTGGGTCTTCTTTAGTT
CCACTTTCACGACCTGAAACGACTACGATTTGATAACCCATAAGAGCATACATCTTAGACAGTTCAACAA
CCATAGGATTGATAACATCGGTATCGCATTTTTCAAGGTCATAAGGACCACGACCATTCATTTTAGCTAG
TGTACCATCAACATCAAAAATAACTGCTTTTGGTTTACCAGGAGTCCCATTATATACTGGAAGACCGAGA
TACTCTCGCATGCTTTTATACATTGAACGTAAAACATCAATTGGTACTGCTTTAGTTCCGCGTTTTGAGT
TACGTTTAACCAATTCAGTCCAAGGAACATCAAACACTTTATGTTCAACTTTCCAGCCGTATTCTTTGGC
AAAAGTTTCCCATGCTAGGCGACGTTCAGGATTCAGGTTAGTATCTGAAATGATTACTCCCTTAACAGAA
TCGCCACCGTACAGAATACTTTTAGCTGTATCAAACTGCATACCAGTTACGATACCTTCTTTCTTTTTGG
TATACTTGTACTCATCGCGTTCTTCATGCGCCATAATAGATTGGCGATAGTCATCACGATTGATATTATA
AAACCCGGGATTCTTAGCAATAAATTCACGAGCCCAAGTACTCTTACCAGAACCAGGACAGCCAATAGTC
AAAATAATCTTTTTCATTTATTTTTTCTCAACTAATGATTGAATATAATCATGTAGGTCTTTAGATGCTT
TACCCCACTTATTTTGATATTCATTTTTGAGATTAGCACGTGATTGAGCTAATAAAACATCATTAGTTGG
AGGTAAAGATTCTAACCGCTGAATCTGGCGTCCATAAATCATTGCAGCCATCTCGGATTCATAAATCAAT
CCTTTGAGATGTTCAAATTGATGCCATGAAATCATTTACATTTATCCTCTTTTAGCTCTTGACGATAATA
ACATRTCATAGTTTTCTGGTCATGTACATATCGTTTTACATCATTAAGCCAAATACGAAATTCCTGAGAA
TCTTCAAATGGCATACCGACCCAGGCTTTACCATCAATAACTTTAACTTGCCAAGATAGTTTAGCTTCAT
CATATGACTTTATTTGCACAGGCCAATTAGGATGAACTGTTTCTTTCTTTACTTCTAGAGGCTTTGTCGA
ACAACCAACTAGAAGACCAATAGATAATATTACTGCTGATAGTTTAATCATTTAGAAAGGTCCTGGATGT
CTTCTGCGAACTTGTTGAAGGAGTTGTTGATTTGTTTTTCAACCAATCCTGGCTTATGAGCCACCACATC
CGCCTTCTTTGCATCTTTGCGCAGTTTTTCATTTTCACGCTCAATAGCAGCAATTGCCTCACGATTTTTA
TTATTCATCGCATCAATATAATTATACTGAATTCGCAAATTATTTAATGCTAAGGCGTTTTCATTGGCCG
TTTTTGTAATTTCAGTAACTGATGTTTCTAATCTTTCTACCTTATGTTTTAAAATAATAGATGTTCCGCC
AAATGCTATTACAAGTAATAGCAATCCAGCTGTAAAATTACTTACATGCATAAAGTTTTAATAACCTCTA
CAATATCGTCTTGAGAAAGACCGTTAATTAAAATATGATGTTCAGCTGGAGATTTAGAAATTTTAAAGCA
TGCCTCAACATCTTCTGCCATATCCGATGCACTACGATTTGGATTACTAATACCAAGGCGATGTTTTCCC
GTCAAAGGATTAACGATGATATAGCATTTGCAGCTATTGATATGAACATTGGGTTGAGTCTGATTAATGA
ACACTTCACAATCATACTTAGCAAGTTGATTTTCTAAAAAGACTTTCATCTCTTCAACCGCATCAGGAAG
CATATCACGGGCTTGCTCAAGACGACGATTTCGATATTCTTTAATGGTCGTTTTCCGCTTGACTTGCTTA
GCTAAATCTTTCTTAAGACCAGTGATATATCCAACTCGACGATTTCCTTTGAATACAGAAATCCCATCTG
TAGTATCACCGTATGCTTCAACGACCATTTCAGTAGTAATAAGTTGTAAATCCATCATAAAGTCCTCATG
TTATGTCAGTAAGACTACTATAACACAACACGAGGGACTTGTAAACAACTTAGTATCCTTCTGGGATAAA
TTTTTTATAATTTTTCAAAAAATTCTGTTCGATTTCACACATGACCTTTTCTTGACTATCGTACCCCTGG
TATAAGCTCATGATGATACCGAACAGGTGATCCATTCCAGCACCTTTAGCAACACCTTGTGCTTCCATTG
CATAAGTCTTTCTATCCTTACCGCAATGCTTATTATGACAGTCAAGAACTAAAAACAGAGCTCGGTCTAA
GTACTTCAGATAAGTCGTTTCAAATGCTTCAATTTTTCTGTATGAATATTCATCGTCAGCATACATTGCT
TTAAGATCATCTGATGCACCATCAATAATAGTCTTAAACAATTTTTCTGGATTATCTAATGAACTTTTTG
TACTATGAAGAGACACGTACCAGTCAGACTTAATTTTAAAATGAGAACCATCTTTCATCACAGCAACATA
GCCTTCGATGTTTTCTGCATTTTTAGCTTCTTCTATCCATTTAGGGCTATCGATTTCGTATCGTTCAACT
AGATACGGACGAAGAGTAGCATCTTTATAAATATCATCGTATGAAATGTATTCACCCGTTTCGTTTTCAC
GAACATTCAGTAAAATAATTTTCATCTCTTGATAAGCAAGAACGATTCTATTCGTCGGGGCAACGAATTC
GAAGTTAGCAGTAAATCCATCTTCAGCTAATTCTTTAAGTCTATCACGCAACCGATGGTGATTAATATTC
ATCAAAATTCCATTAGCCATTAAAGCCTGCTCAGATTTGATTGAACCCTTTGATTTGAACAGAATTTCAT
CACCGTCTAAATAAGTTGATACCAAAGACCCGTCTTCTTTTGTTAGAATATAATCAACATCGTTTAAATC
GATATTCATCGTGAACGGATTTTCATTCAAGTTAAAAAACTTTTCCATAGGACGAGAAGCAATTCTTACT
GGTTTTTCTCCATCCATTTCAAACATAATTCCACGACATTCTAGTGCATCTGGAAGTAACCAATCAGAAT
AAGATGCATAATTATATGAGAAAATTCTGTAAGTTCTTCCAGATGCACTTACATCATCTGAGTAAAAAAA
CTTACGCTGCGAATCCTTACATAGTTCCATTAAATTGTTAAAAAGTTCTTGCATTGTGTATCCTCTTTTG
TGTTTTGAATATAGTACCACACTCCATGTGGAAGCATCATTTTTTCTTGTGTTGAATATTCCAAGGCGGG
TTAAACAGTTTAATGAATAGAGGCTCCTCTAAGTCAATCGTTGCGATTGTCATTGTACCTAACTCATTTG
TCATAGAAAGATTAAAACATTGGCGGGCGTAAAATTCAACTTTGCTTCCTTCCTTTAGCGCAGAATGAAT
TAATGCAGATTTAGTAGAATCAGACGTTTTGTCTTTGCGGTTAATAGCAGTTCTATAATAGTTTATTCTT
TTACGTAAATTTTTAGTTTTTCCAATATAAACAAGCTCATCATTTATAGCAATAGCATAAATTACGTTAT
ACTTGTTTGGAATAGATAATTGTTTTATACTTCCATTGTCGTCTAATTCTAGCTCAGTATATTTAATAAA
TGAATATTCTGTTGCAATTTCTTTCATAATAAAATGGGCCTTGCGGCCCACTCCTTAAAAGTATTTTTTA
AAACTCATCATAACTTTATCATCAACATCATTATCAATCTGTGCAACAAGGTAAGATGACAGTTCTACTT
CTTGCGGCGCGGATTGAACATTATCAGAATTAAGATATTCACGAATCCAAGGATATGGATGTTTAACCGG
AGCATCGGTAATTGGGCATGGAAGACCGCACTGTTTCATACGAGATACAGTTAAGTAATCAATAAAGCTC
CACATGCTATTTGTATTTAATCCAGGAACATCACCATCTTTAAATAAATGAACTGCCCAGTCTTTTTCCT
GGCGGTTAACTTCCATGAAAATATCAACTGCTTCTTGTTCACACTCTTGGGCAATTTTAACCCATTCATC
ACCATCAGTACCGGATTGAAGTTGACGAATAATATATTGGGTGCCTTTAAGGTGAAGCTGTTCATCACGT
GCAATGAACTTCATAATCTTGGCATTACCTTCCATGATTTCCATGTTCTTATGGAAGTTAAAGGTACCGT
ATGTTCGATTGAGCTCGCTAATTCTCAACCCGTTCTCTTATGAACTGCTGCATGTTACCATGCAGTCCAG
ACTATATCACAATCCCGGAGGGATTCTCCCCATTTCGAGTCGCTTGACCCTACGTCCGAAGACTAGTCGT
TGAACCTTGTTTTGCAATTGTCGCCGTGCCATCGTTTATATGTTGATGGTGATAAATCTTTCTTATCACA
ATATGGACAATTCAATTGAATTCTATTTGGATTTAATTTACATCTGTCATTATGTTTTAGATAAAATCCA
GGACCTTTACCAATGTGACCACAGAAATCACATGTGATTTCTTTTTGTGCAGGATGGGTCCCGTTCTTAA
CCATTTCTAATGTTTTTGCTGATGTTCTTTTCTTATGTTCTTCCATCAGAATCTTTAGGTATAGGTCCGT
TAGCATCTATCCAAATTTTTCTATAGTTCAATTGTGCATCCTCTTAAAAGTATAATCATATTTATATTAT
ACTAATTAAAGGTGCAAGCAAAACCTTGGCTGCTAGTTTTCCATAAAGGACTTTCCAGCAATTAAAGGAG
TTTTCGATAAACGTTACCGTTTAAAGGCGCATTTTACGCAAAAGATACATAAAAACGAATAGCTTCTAAG
GCATTAATAACGTGCAAACAGAGGTAAAGAGATTTCATCAGATCTCGTTTAGCTCTTTGCTCAACGTCTT
TATCAGCTAGAATTAGACCTTGGTCTTTATAATATTCAACCATGTCTTTAGCATTTTCCCATTCACGGGT
TTTAACCAAGACATCATCGTAATATCGCCCAATGGACTCAGCACGTTTCATAATAGCTTCATCTAATACA
ATCTCATCAAACACCTTCGATGGATCAGTATAAAGATTTCGCATGATATGAGTATATGAACGACTGTGAA
TAGTTTCACTAAAAGTCCATGTAGCAACCCATGTATCAAGGCTTGGGTCTGAAATTAATGACATAAGTAC
AGCAGATGGCGCACGACCCTGAATGCTATCCAAAAGTGATTGATACTTCAGGTTGTTAGTAAAAATATTT
TGCTGATACTGAGGAAGCTTATTAAATTGCGCAGCATCCATCATTAAGTTTACTTCTTCAGGACGCCAAA
AAAAACTGATCTGCCGCTCAATGAGTTCTTCAAATACTCGATGTCGTTGAATATCATATCGAGCTAAACC
TAATCCAGAACCAAAGAACATCGGTTCATTCAAAACATCAACTGGATTTGTATTAAAAACTGTACTCATT
TAGAATCCTTAAATTTACATTTATCATAATGCCATCTTAAAGCATTGCCTTTATTAACTTTCTTACCACA
GTGCGGGCAAGGTGGATACTCTGCTCCTTGTTTAGTTCTCAAAGAAATCAAATCACGGGTTTCTTTAGTA
TGAGGAACATCTCTTGTCGGAGAAATTGTACCATACATCGGATTAAGCACGCCGACTTTAGCAGCAGCTA
TATTCTTTTTAGCTTCTTCAGTTTTAGGCTTTCTCATCTTTTTCTTAGGTTTCTTCGCTTTTAGCCCTTC
CTTTGGTTGCCGCCGATATTTTGTGTTTGGTTTCTTCTGTTAAACGCAGACCTGTTTTCGCTTTTTGACA
TTTTCAGTCTCGTTTCTTCAGAAATGACCGTACCTTTGCGAAATTGCGAATTTAACTTCTTTGCATGGGC
ATATATTTTAGAATGAACTTTATAATGACGTTTCTTAGTTCCTTTCATATTGCACATCATGAAAAATGCG
AATATAACAGATTTTACCGGATAAATCTTTGATAAAATAGCATGCGCTATAAAATGCTCTCTAGCTGTTA
ATTCAACTAAATTTTCTTTATCATCAGAACCTCCCATGCATCTAGGGATTATATGATGTGTCTCTTTATA
TTCGGATAAAGGTTCCCGAGCCTGAGCTCGGGAAATTAGGTCGTTATAGATTTTTTGATAATTCATTACA
ATTTACACGCTGCACAATCATCGGCTTTAGGAGTTTCTATTTCATAATCATCAGTACCAGAACCATCACG
GGTATTATGATAATAGAAATTTTTAATGCCATAATACCATCCGTATAGCATGTCATCAATCATTATTGAC
ATTGGAACCTTTCCTTTTGGAAAAATCTGCGGGTCATAATATGTATTCGCTGAAGCTGATTGACATACCC
ATTTCAGCATAATAGCTACCTGCGTAAGATAAGGTTTATTACCTTTCTTAGCTAATTTCCATGTATAATC
ATAGAGGTCTATGTTATGCTCAATATTGGGCACGACTTGATTAAAGGAACCCTCTTTTGATTCTTTAACA
CTTACCGGTCCACGTGGAGGCTCGTAGCCGTTTGTACTGTTAGAAACTTGGGAAGATGACTCACATGGCA
TAAGTGCTGATAATGTGCTATTACGGATGCCAAATAGCTTAAGGTCTTCCCGCAGCGCCGACCAGTCACA
AACGTATTTTGGAGCTGCGATTTGGTCAATCTTTTTATTGTACCAGTCGATAGGTAATTCGCCTCGAGAC
CAACGAGTGTCTGAATAATATTCCGAAGGTCCTTTTTCTTTGGCGAGCTTAATGGATGCTTTAATGAGTC
CATACTGTAATCTCTCAAATAGTTCATGTGTTAAATCGTTAGCATCTTCATAAGAAGCAAAGTTACTTGC
CAGCCAAGCTGCATAGTTGGTAACACCTACACCGAGGTTACGACGCTTTTTAGCTTTTTCTGCTTCAGGA
ACCGGATATCCTTGGTAATCCAACAGATTATCAAGAGCACGAACTTGAACTTCTGCCAATTCATTAATTT
TATCTTGGTCTTGCCAGTCAAAATTATCTAATACGAATGCAGAGAGAGTACACAATCCAATTTCAGCATC
AGGGCTATTCACATCATTTGTTGGAATAGCAATTTCACAGCACAAGTTACTCTGACGAATAGGTGCCTTT
TCACGAATAAACGGAGTATAGTTATTCGTATTATCAATGAACTGCACATAAATCCTTGCTGTTCCTGAAC
GTTCAGTCATGAGCAATTCAAATAGTTCACGGGCTTTAATACGCTTTTTACGAATATTAGGGTCTTTTTC
TGCTGCTTCGTATAATTCACGGAAACGGTCTTGGTCTTTAAAATAAGAATAATAAAGCTCGCCACCCATT
TCATGCGGACTGAACAAAGTAATGTAATCGTTTTTTCCAAAACGTTCCATCATCAAATCATTCAGTTGAA
CACCATAATCCATATGACGAATGCGGTTTTCTTCTACGCCTTTGTTATTTTTCAAAACGAGAAGATTTTC
AACTTCCAAATGCCAAATAGGATAATAAGCAGTAGCAGCGCCGCCACGAATTCCACCCTGTGAACATGAT
TTAACTGCAGTCTGAAAATGTTTCCAAAAAGGAATAACACCAGTATGGCGTACTTCACCCATGCCAATCT
TAGAACCTTCGGCACGAATCATACCAACGTTAATACCAATTCCAGCGCGTTTAGAGATATATTCAACAAT
TGAAGCAGAAGCCTTATTGATAGACTTCAATGAATCTCCTGCCTCAATAACAACACATGAACTAAACTGT
CGAGTCGGAGTACGACAACCAGCCATAATAGGAGTTGGCAATGAAATCTGTCGAGTTGATACTGCTTCAT
AAAAACGGATAACATGTTTTAATCTATCAACAGGTTCATCTTGATGCAGTGCCATTCCAATAGTCATAAA
TGCAAACTGTGGAGTTTCATAAATTTGACCAGTGGTTTTATCTTTAACTAGATATTTTTCTTTTAATTGC
ATTGCCCCGGAATAAGTAAATTCCATATCCCGTTCGTGCTTAATTTTTGATTCTAAAAATGTAATTTCTT
CTGCTGAATATTTTGACAATAATTCAGGGTCGTATTTACCTGCATTTACACAATAAGAAATATGGTCAAT
AAATGAACGTGGTTCATACTGCCCATAAACATGCTTACGAAGAGCAAACATTAAACAGCGTGCAGCTACA
TATTGATAATCAGGTTCTTCAACCGAAATAGAATTCGCAGCAGCCTTAATGACAATAGTCTGAATATCAT
CAGTTGTCATTCCATCACGGAGATAAGATTTAATATTTTCATATAATTCATAAGGATCTACTGATGTTCC
TTCAGCTGCCCAAGATAAAACTTTAATAATTTTTTGTGGGTCAAAGCTCTGAGAAACACCACTACTTTTG
ATAACATTAATTAATTGCATAAGTCCTCAACTTGAAAATCGTCTTTAAACAATCGGTTAACTATATGAGC
TATTATATCACCATGACACGGCTTTGGTTTACATGTGCATCCTAGCCTCATTCCACGTAAAGGCTCTAAA
TGTGCTTTAGTTATTTCTCCGGATTTAATTCGACGTATAAAATCTTTTTTGAATAATTCAATGGCAGCCT
CCCGGCTGCCAGCATCTTTACCGACGTAATTTCCCCAAAATGTACCGCGGTGAATATTAACATCAAAGTC
GGATTTATATTTATTCACTACCCGGCATAGACGGCCCACGCTGGAATAATTCGTCATATTGTTTTTCCGT
TAAAACAGTAATATCGTAGTAACAGTCAGAAGAAGTTTTAACTGTGGAAATTTTATTATCAAAATACTCA
CGAGTCATTTTATGAGTATAGTATTTTTTACCATAAATGGTAATAGGCTGTTCTGGTCCTGGAACTTCTA
ACTCGCTTGGGTTAGGAAGTGTAAAAAGAACTACACCAGAAGTATCTTTAAATCGTAAAATCATATATCC
TCGCAATAATAAAATTACACCGCCATCTTTCCTTTAATAGGAGGGTGTGATACATAGTTGTTAAGAACGA
AATCTTTAGGCCTAAGTTTAAGAACATATTTTAATTGTTCTTTAGTAGAAAGATATCGGAATTTATAAGG
TAGACCACTTATTACCAGCTCACAAAGCTCTTTAGGTTCACGCCTCAAAATTTCTTTACATTGTTCTACG
TGATTCATATAGATATGAGTATTACCACCAGAAAATATCAAATCCCCTGGAATAAGATTACACATCTTAG
CTACAATATGAACTAACGTAGCATATGACGCAATATTAAACGGTAGCATTATGTTCAGATAAGGTCGTTA
ATCTTACCCCGGAATTATATCCAGCTGCATGTCACCATGCAGAGCAGACTATATCTCCAACTTGTTAAAG
CAAGTTGTCTATCGTTTCGAGTCACTTGACCCTACTCCCCAAAGGGATAGTCGTTAGGCATTTATGTAGA
ACCAATTCCATTTATCAGATTTTACACGATAAGTAACTAATCCAGACGAAATTTTAAAATGTCTAGCTGC
ATCTGCTGCACAATCAAAAATAACCCCATCACATGAAATCTTTTTAATATTACTAGGCTTTTTACCTTTC
ATCTTTTCTGATATTTTAGATTTAGTTATGTCTGAATGCTTATGATTAAAGAATGAATTATTTTCACCTG
AACGATTTCTGCATTTACTACAAGTATAAGCAGAAGTTTGTATGCGAACACCGCACTTACAAAACTTATG
GGTTTCTGGATTCCAACGCCCGTTTTTACTTCCGGGTTTACTGTAAAGAGCTTTCCGACCATCAGGTCCA
AGTTTAAGCATCTTAGCTTTAACAGTTTCAGAACGTTTCTTAATAATTTCTTCTTTTAATGGATGCGTAG
AACATGTATCACCAAACGTTGCATCAGCAATATTGTATCCATTAATTTTAGAATTAAGCTCTTTAATCCA
AAAATTTTCTCGTTCAATAATCAAATCTTTCTCATATGGAATTTCTTCCAAAATAGAACATTCAAACACA
TTACCATGTTTGTTAAAAGACCTCTGAAGTTTTATAGAAGAATGGCATCCTTTTTCTAAATCTTTAAAAT
GCCTCTTCCATCTCTTTTCAAAATCTTTAGCACTTCCTACATATACTTTATTGTTTAAAGTATTTTTAAT
CTGATAAATTCCGCTTTTCATAAATACCTCTTTAAATATAGAAGTATTTATTAAAGGGCAAGTCCTACAA
TTTAGCACGGGATTGTCTACTAGAGAGGTTCCCCGTTTAGATAGATTACAAGTATAAGTCACCTTATACT
CAGGCCTCAATTAACCCAAGAAAACATCTACTGAGCGTTGATACCACTGCAAATCCAAATAGCCATTACG
CACATTAAACTGATAGAACATATGACAAGGCGGTAATGCCATATATTTAAGTTCAGCTGGATTCCATGCA
GAAACAATTTGACGCCTATCATTTGGCAGTTTTTTAATACGATCAATAACTTCTATAATTTGGTCTACAC
CACCAAAATCACGCCACTGTTTTCCATAAATTGGACCAAGTTCACCGCTATGGTATCCTAAATCTTTTGC
TTGATTTTCGTAATTTTCATCCCAGACTGTTTTGCCTTGGATTAACGAATCGTGTTGAATTAATCGTAAA
TCATTGACATTTGTGCTTCCTGATAAAAACCATATTAGCTCAGCAATGCAAGCTTTCCAGGCGAGCTTCT
TAGTTGTTACCGCAGGAAAACCTTTAGTTAAATCCCAGCGTAATTTAGATCCGAACAGAGCAATTGTTCC
TGTGCCTGTACGATCATCGGTTTCATAACCATTTTCAAAAATGTCTTTAATTAAATCTTGGTATTGTTTC
ATTTATATACTGATTCCGTAAGGGTTGTTACTTCATCTATTTTATACCAATGCGTTTCAACCATTTCACG
CTTGCTTATATCATCAAGAAAACTTGCGTCTAATTGAACTGTTGAATTAACACGATGCCTTTTAACGATG
CGAGAAACAACTACTTCATCTGCATAAGGTAATGCAGCATATAACAGAGCAGGCCCGCCAATTACACTTA
CTTTAGAATTCTGATCAAGCATAGTTTCGAATGGTGCATTAGGGCTTGACACTTGAATTTCGCCGCCAGA
AATGTAAGTTATATATTGCTCCCAAGTAATATAGAAATGTGCTAAATCGCCGTCTTTAGTTACAGGATAA
TCACGCGCAAGGTCACACACCACAATATGGCTACGACCAGGAAGTAATGTAGGCAATGACTGGAACGTTT
TAGCACCCATAATCATAATTGTGCCTTCAGTACGAGCTTTAAAATTCTGGAGGTCCTTTTTAACTCGTCC
CCATGGTAAACCATCACCTAAACCGAATGCTAATTCATTAAAGCCGTCGACCGTTTTAGTTGGAGAATAA
CGGAATACCAATTTAATCATTACGTAAATCCTATTTTAATTGAAAACGAATGCTTACTTGGATAATTTCA
ATGACATACATAATATTTTCCTCAAACAGACTTTTTCACAATTTTCCAATCAGCTTTAAACTGCTCGACG
TCAGAATGGTAAATCCAAAATCCTGCGCTTTCTCCGTCTTCATAAAGAGGACATCCATCGCATTCATCTT
CCCATCCCATATCACGTAAAAGATGTTCAGCTTTTTCAACAAGTTCAGAATCTTTACCGATGATATTAAA
ATACCATTTACCTCTAACTTCTGAATCTTTGATGCTCTGGCGTTGTAATCTCATTTTATTCTCCTTAGCA
AGCTTTAATCAAAAGATATAAACAGACCAACATAACTGCTGCCATAATATAAGGTGCGAACATTTTCTTT
TCTCCATTAGTTTTGATAGGGTAATAGTATCACACTACTACCCTGATGTAAACTACTTTTTGAAAGTTTT
TCGCAAAAGTTCAATGATTTCATCTACATTGTTTTCGTCAACAATGCAGTGAATTTTTGTTACGCCAGAA
ACCTTGTCTTTGACTTCATCTTCTTCAGAAGTCGGTTCTTTATATTCGCGGAAACAATAAAACTCTTCTT
CACTAAGTTCAAAATAATCATCACCCATACCATCATCATTATAGATTTCACCATTAGCACAAATGATTTC
GGTTACATAATCAAAGCCATCTAAACTTGATATTGATTTAACTTCAAACCAACCGCCATTTTCTTGAATG
ATGCCGACCATACTAGCATTTGATGAACTAATATCAATGAAAGATTTAATACGATGTGGATTTAACTCGT
ATTTTTTGCCGATTTCCATTTTGATTTTCCTCATTTTAATAGGGGCTTGATAGCCCCTTGATAATTATTG
TTCAATCAGTCCCATGTAAAATTCTGCGTCTTCAGAATCCATGCCATCACAATATTCATTAGCCATAAAG
CGGGTGAGGTCTTCAAGAGGACCTTCAATAACGATTTGAATACTCCAAAACTTAGAATCTTGCACGCTTG
TGATACTAAGTTCAGGATAACGATTACGAATAATCTCTTCAATATATTCAAAATCAACGATGTCAATATC
AACTTTAGCCATATTATTTTCCTCTTTAATTATTAGCAGTATTGCCGATAGTTGTATAGTACCATAAAGC
TTTATGCTTGTAAACCGTTTTGTGAAAAAATTTTTAAAATAAAAAAGGGGACCTCTAGGGTCCCCAATTA
ATTAGTAATATAATCTATTAAAGGTCATTCAAAAGGTCATCCAGGTCCGTGTCATCAGCACTAGATGAAC
TACCAGAGCTTGAGCTCATAAAATCATCTTCAGTTTTTGTATTGAAGTCATCAACATTGAATGCATCCAA
ATCATCAGCCACTTTATCAGCTTTCTTAGCAGCAGTTGCAGCAGCACCGCCCATCACAGCAGTTCCCATA
ACTTGACCGAATTTAGTATTAAGTTCTTCAAACGATTTGAATTTATCTTTAGAAGTCATTTCAGAAAGGT
CAACCATTTGTTCGAACAGTTCTTTCTGGAAAGATTCATCGTCAATGTTTGGAATCGCAGATTGATTCAG
GAATTTAGATTCATCGTAGTTACTAAATCCAGAAACTTGTTTAACTTTCAGTACAAAGTTAGCACCTTCC
CACGGACAAGTTACATCAACTGGAGTTTCACCCATTTCAACATCAACCGCAATCATTGCATTGATTTTAT
CCCAGATTTTCTTACCAAAGCGGTATTTAAATACTTTACCTTCGTTTTCTGGAGCAGCTGGGTCTTTTAC
TACAAGAATGTTAGCCCAGTAAGAAGTTTTACGTTTAACAAGACTGTACTCTTTATTGTCAGTGTTGTAT
AGATCATTTTTACTGATGTATTGACATACTGGGCAAGAATCGTAATCACCATGGGTAGATGAACATGTTT
CAATATACCATTTACCATTTTTCTTGAAACCGTGATTTACAAGAATTGCGAATGGTGCTTGTTCATCATT
TTTAGACGGAAGAAAACGAATTACTGCTTGACCGTTACCCGCATTATCGAGTTTCAGTTTCCACTCGCCT
TTATCTTCAGAAGAAAAACCTTTATTGCCATTCAGTTTAGCCATTTGTGCAGCGAGTTCAGCAGTAGATT
TACGTTTAAACATTTTTATTTCCTTTTTAATTTAATTTAATTAACAGTTGGTGCTATGACACTTTACCTC
ATAGCTGGCATAATTCGCAATACTCTGGGTCTTCGAGAGGTATCCAACCTGAGTTGAAATACTTTACCAT
CGATTTAGCAGTTGTATCAGTTATATTTATATTACCTTTAACTCTTCGCCATCCAGGAGTTTTACCGTAC
AGATTAGAGGATAATAATAACACATAATTCTCGTAAGCAATATGAGATAATTTCCAAGACTCTATATTAG
CTCGTGATGTTTTCCAAGGTCTAAAATCGTCACGGTTCATATAATTAGCCAATCTCATATGCTCTCTAAC
TTCCGGGTCTTTGGCTGGATGAGTTTCACCACTCACACCAAATCCACCACCAGCATATACCAGATTAAAA
TAGTCTGGATTATCTCTGGCATTTACTTCAAGTTGGTATTTTCGTTCTGCTTCAATAACATCCAAGTCAT
CATCAATTTGAATTATTTTAACGCTCGGTTTTTGAAGCATTAGCGCATTCAAAAATCTTTTTTGTTTACA
TGAGCTCCAGTATTCCTTTCCGGAAGAGTCATATATTATTCCGTTCTCAAATGAGCAATTTAATTTACTA
CCGATATAGTAGTATGGCGGAGTCTTATTTTTGACACGGTCTTCAAATGTAAACCAATATACTATATTCA
TATCAATACTTGCAAGATTTCACAGTTTCAATGAAAACATTTTTAGCTTTCTGTGAATCAATATTTAAAA
TTTTTCTATAAGCCTTTAACTTTATAGAATAATTATTCCAGACTAAATTATCAGTCTGTTCATCATGTTT
ATCAATTATATTTAAAAACGAATCAAGCAAGATAAACGTCTCAAACGAAATTATGTTCGATTGCAGAAGT
TTAAAAATATAACTTGATTGAACTTTTGGATTATACTCAAAAATTTCTTTAAAAGCAGAAACTTCAACTT
TTTTACTAAAATAATAAATGTTGCGAATATCTTCTTCAAACTTAAATTTAATTTGCTTTAAGCGTCCGAT
ATATTCACGATAAAACACAAGTGCATCAGCGTCAGAGATGTCACCAATCCAAGCATCTTGGTTAGCAACC
AAATTGCTTATAAAGATTAAAGCAAGTTCCTTTAATTTATATTTTTCTGATAACTTCTGGAAAAAATACT
TATCCCTTCGCTTTTGATAAGCGGCATCAGACACCCGCATGCACCAATTATACTTAATTACATCATACTT
TCCATTCATATGTTGTTTTATCATTAAGTATAATTTATAAACTGATTTACCATCAATGTATCTTTCACCA
CCAGCAGGCATGCGGAGTTTAATCATAGTAGAAAATCTAATGTATTAGTTTTTTCACAACGAACAACAGA
AGGACGTAAAAGATTTTCGTCAATAGCTTCTGACTGAATTTTTTCAATTATACCCGAAGGAATAAATTTA
GCAAATTGAGTTTCAGGAATAGAATTTTCTTCTAAGAATGCTGTTGTAGCTTCAAGATAACTCATTCCAA
ACTCTTCTACCATTTTTTCAATAATAAATCCATTTTCTTGGCGGTCAAGAAGCTTTGCTATTTCATCCTT
TTCTTTCTTAATTGAAAGTTCTTTTTCTGAAAGACCGGTCTCATCGACCGGACGAATATCATTTAGAGAA
AACTGTGTCATAAAGTTCAACTACCTCTTCAGTTTCAGCTTCAAACACATCACGGTTATCTTTATGATAC
AAAGCTAATAGACGATTAAACATCTTACCATCAACGCCAAGTTCATCTTTAGCACGAATTCGAATATCTT
TAATCAGTTCATTATAACCGGAAATTTTCAGTTTATGATCAGATGCTTCTTTAATAAATTTAGCCAAGTC
TTCGCCATGGATAGCTTCATCAAATTCAACCATTTCTTTTTTAGCCATTATTCACCTCAAAATTCATTAA
TGCTATTAGTTAATTTAGAAAGACCCGCTTTTACAAAATATGAATAAATTTTGCCACGCGGTGGTAATTT
ATATGAATTATAGTAATTCACAATGTTTGAAGCAATATTATCAGGAATATAATCAAAATCAATTAGAACT
AAATTTTCTTTATAACGATTATATTCAGATTCAGTGAGAAGCACCTTAGCTTGCTCACGGTCATTAGCAA
TAGCTTCAACGATTGAAGTTTTCATTGAAGGAGTTCGTTCACCTTCAACTCTGGTAAACCAAAAGTCAGA
TCGTACTTTAACTGAAGCAACGTTATCCTTTTTGTCGCCTTTAAGGATTTTAGTCATACAGTCAATTTCA
GCAGAACCGCTTTTAATTTTAACCCATTTCTTATGCATCGGAGACCATTGCTTAACATTTGGATATTTGT
GAAGCTGAGTAAAGTCACCATCTGACGAAATGATTAAAATCTTATGTCCTTCTAAAGAGAACTTTTTAAC
AAGAACAGCAATGTGGTCATCTGCTTCATACTTATCAATATCCATAACAATGTATGGCATATAAGCTTTC
AATTCATCTATAACTTTATGGCTGGATTCAAAATAACCTTCCCAGTCCCAAGTAGATTCTTCTCGTGCTT
TTCCACGGTTTTTCTTATAATAATAAGCGAAATCACGACGCCAATATCCAGATTTCGCGTTATCAATACA
CAGTACAATTTTAGTGTATCCAAGCGTTTTTGCTTTTTTGACATTAAACTTAATTGAGTTCAATATCAAA
TGACGAACCATTGATAAATTAATTTTTTCTTTATCTGGGAAGTTTACCAAAGCAGTTGAAAGCGCAATTT
GACTAAAGTCAATTAAGCAGATTCCTTCTTTGTAATCTTCATCCAACATCATTTCTAAATCCATATGAAC
CTCGTTCAATTAGTGAGATTTCTATTATATACCATCCAAATCTTAAAGTAAACAAGTATAAATACTTATT
ATTGAAAACACAATAGGAGCCCGGGAGAATGGCCGAGATTAAAAGAGAATTCAGAGCAGAAGATGGTCTG
GACGCAGGTGGTGATAAAATAATCAACGTAGCTTTAGCTGATCGTACCGTAGGAACTGACGGTGTTAACG
TTGATTACTTAATTCAAGAAAACACAGTTCAACAGTATGATCCAACTCGTGGATATTTAAAAGATTTTGT
AATCATTTATGATAACCGCTTTTGGGCTGCTATAAATGATATTCCAAAACCAGCAGGAGCTTTTAATAGC
GGACGCTGGAGAGCATTACGTACCGATGCTAACTGGATTACGGTTTCATCTGGTTCATATCAATTAAAAT
CTGGTGAAGCAATTTCGGTTAACACCGCAGCTGGAAATGACATCACGTTTACTTTACCATCTTCTCCAAT
TGATGGTGATACTATCGTTCTCCAAGATATTGGAGGAAAACCTGGAGTTAACCAAGTTTTAATTGTAGCT
CCAGTACAAAGTATTGTAAACTTTAGAGGTGAACAGGTACGTTCAGTACTAATGACTCATCCAAAGTCAC
AGCTAGTTTTAATTTTTAGTAATCGTCTGTGGCAAATGTATGTTGCTGATTATAGTAGAGAAGCTATAGT
TGTAACACCAGCGAATACTTATCAAGCGCAATCCAACGATTTTATCGTACGTAGATTTACTTCTGCTGCA
CCAATTAATGTCAAACTTCCAAGATTTGCTAATCATGGCGATATTATTAATTTCGTCGATTTAGATAAAC
TAAATCCGCTTTATCATACAATTGTTACTACATACGATGAAACGACTTCAGTACAAGAAGTTGGAACTCA
TTCCATTGAAGGCCGTACATCGATTGACGGTTTCTTGATGTTTGATGATAATGAGAAATTATGGAGACTG
TTTGACGGGGATAGTAAAGCGCGTTTACGTATCATAACGACTAATTCAAACATTCGTCCAAATGAAGAAG
TTATGGTATTTGGTGCGAATAACGGAACAACTCAAACAATTGAGCTTAAGCTTCCAACTAATATTTCTGT
TGGTGATACTGTTAAAATTTCCATGAATTACATGAGAAAAGGACAAACAGTTAAAATCAAAGCTGCTGAT
GAAGATAAAATTGCTTCTTCAGTTCAATTGCTGCAATTCCCAAAACGCTCAGAATATCCACCTGAAGCTG
AATGGGTTACAGTTCAAGAATTAGTTTTTAACGATGAAACTAATTATGTTCCAGTTTTGGAGCTTGCTTA
CATAGAAGATTCTGATGGAAAATATTGGGTTGTACAGCAAAACGTTCCAACTGTAGAAAGAGTAGATTCT
TTAAATGATTCTACTAGAGCAAGATTAGGCGTAATTGCTTTAGCTACACAAGCTCAAGCTAATGTCGATT
TAGAAAATTCTCCACAAAAAGAATTAGCAATTACTCCAGAAACGTTAGCTAATCGTACTGCTACAGAAAC
TCGCAGAGGTATTGCAAGAATAGCAACTACTGCTCAAGTGAATCAGAACACCACATTCTCTTTTGCTGAT
GATATTATCATCACTCCTAAAAAGCTGAATGAAAGAACTGCTACAGAAACTCGTAGAGGTGTCGCAGAAA
TTGCTACGCAGCAAGAAACTAATGCAGGAACCGATGATACTACAATCATCACTCCTAAAAAGCTTCAAGC
TCGTCAAGGTTCTGAATCATTATCTGGTATTGTAACCTTTGTATCTACTGCAGGTGCTACTCCAGCTTCT
AGCCGTGAATTAAATGGTACGAATGTTTATAATAAAAACACTGATAATTTAGTTGTTTCACCTAAAGCTT
TGGATCAGTATAAAGCTACTCCAACACAGCAAGGTGCAGTAATTTTAGCAGTTGAAAGTGAAGTAATTGC
TGGACAAAGTCAGCAAGGATGGGCAAATGCTGTTGTAACGCCAGAAACGTTACATAAAAAGACATCAACT
GATGGAAGAATTGGTTTAATTGAAATTGCTACGCAAAGTGAAGTTAATACAGGAACTGATTATACTCGTG
CAGTCACTCCTAAAACTTTAAATGACCGTAGAGCAACTGAAAGTTTAAGTGGTATAGCTGAAATTGCTAC
ACAAGTTGAATTCGACGCAGGCGTCGACGATACTCGTATCTCTACACCATTAAAAATTAAAACCAGATTT
AATAGTACTGATCGTACTTCTGTTGTTGCTCTATCTGGATTAGTTGAATCAGGAACTCTCTGGGACCATT
ATACACTTAATATTCTTGAAGCAAATGAGACACAACGTGGTACACTTCGTGTAGCTACGCAGGTCGAAGC
TGCTGCGGGAACATTAGATAATGTTTTAATAACTCCTAAAAAGCTTTTAGGTACTAAATCTACTGAAGCG
CAAGAGGGTGTTATTAAAGTTGCAACTCAGTCTGAAACTGTGACTGGAACGTCAGCAAATACTGCTGTAT
CTCCAAAAAATTTAAAATGGATTGCGCAGAGTGAACCTACTTGGGCAGCTACTACTGCAATAAGAGGTTT
TGTTAAAACTTCATCTGGTTCAATTACATTCGTTGGTAATGATACAGTCGGTTCTACCCAAGATTTAGAA
CTGTATGAGAAAAATAGCTATGCGGTATCACCATATGAATTAAACCGTGTATTAGCAAATTATTTGCCAC
TAAAAGCAAAAGCTGCTGATACAAATTTATTGGATGGTCTAGATTCATCTCAGTTCATTCGTAGGGATAT
TGCACAGACGGTTAATGGTTCACTAACCTTAACCCAACAAACGAATCTGAGTGCCCCTCTTGTATCATCT
AGTACTGGTGAATTTGGTGGTTCATTGGCCGCTAATAGAACATTTACCATCCGTAATACAGGAGCCCCGA
CTAGTATCGTTTTCGAAAAAGGTCCTGCATCCGGGGCAAATCCTGCACAGTCAATGAGTATTCGTGTATG
GGGTAACCAATTTGGCGGCGGTAGTGATACGACCCGTTCGACAGTGTTTGAAGTTGGCGATGACACATCT
CATCACTTTTATTCTCAACGTAATAAAGACGGTAATATAGCGTTTAACATTAATGGTACTGTAATGCCAA
TAAACATTAATGCTTCCGGTTTGATGAATGTGAATGGCACTGCAACATTCGGTCGTTCAGTTACAGCCAA
TGGTGAATTCATCAGCAAGTCTGCAAATGCTTTTAGAGCAATAAACGGTGATTACGGATTCTTTATTCGT
AATGATGCCTCTAATACCTATTTTTTGCTCACTGCAGCCGGTGATCAGACTGGTGGTTTTAATGGATTAC
GCCCATTATTAATTAATAATCAATCCGGTCAGATTACAATTGGTGAAGGCTTAATCATTGCCAAAGGTGT
TACTATAAATTCAGGCGGTTTAACTGTTAACTCGAGAATTCGTTCTCAGGGTACTAAAACATCTGATTTA
TATACCCGTGCGCCAACATCTGATACTGTAGGATTCTGGTCAATCGATATTAATGATTCAGCCACTTATA
ACCAGTTCCCGGGTTATTTTAAAATGGTTGAAAAAACTAATGAAGTGACTGGGCTTCCATACTTAGAACG
TGGCGAAGAAGTTAAATCTCCTGGTACACTGACTCAGTTTGGTAACACACTTGATTCGCTTTACCAAGAT
TGGATTACTTATCCAACGACGCCAGAAGCGCGTACCACTCGCTGGACACGTACATGGCAGAAAACCAAAA
ACTCTTGGTCAAGTTTTGTTCAGGTATTTGACGGAGGTAACCCTCCTCAACCATCTGATATCGGTGCTTT
ACCATCTGATAATGCTACAATGGGGAATCTTACTATTCGTGATTTCTTGCGAATTGGTAATGTTCGCATT
GTTCCTGACCCAGTGAATAAAACGGTTAAATTTGAATGGGTTGAATAAGAGGTATTATGGAAAAATTTAT
GGCCGAGTTTGGACAAGGATATGTCCAAACGCCATTTTTATCGGAAAGTAATTCAGTAAGATATAAAATA
AGTATAGCGGGTTCTTGCCCGCTTTCTACAGCAGGACCATCATATGTTAAATTTCAGGATAATCCTGTAG
GAAGTCAAACATTTAGCGCAGGCCTCCATTTAAGAGTTTTTGACCCTTCCACCGGAGCATTAGTTGATAG
TAAGTCATATGCCTTTTCGACTTCAAATGATACTACATCAGCTGCTTTTGTTAGTTTCATGAATTCTTTG
ACGAATAATCGAATTGTTGCTATATTAACTAGTGGAAAGGTTAATTTTCCTCCTGAAGTAGTATCTTGGT
TAAGAACCGCCGGAACGTCTGCCTTTCCATCTGATTCTATATTGTCAAGATTTGACGTATCATATGCTGC
TTTTTATACTTCTTCTAAAAGAGCTATCGCATTAGAGCATGTTAAACTGAGTAATAGAAAAAGCACAGAT
GATTATCAAACTATTTTAGATGTTGTATTTGACAGTTTAGAAGATGTAGGGGCTACCGGGTTTCCAAGAG
GAACGTATGAAAGTGTTGAGCAATTCATGTCGGCAGTTGGTGGAACTAATGACGAAATTGCGAGATTGCC
AACTTCAGCTGCTATAAGTAAATTATCTGATTATAATTTAATTCCTGGAGATGTTCTTTATCTTAAAGCT
CAGTTATATGCTGATGCTGATTTACTTGCTCTTGGAACTACAAATATATCTATCCGTTTTTATAATGCAT
CTAACGGATATATTTCTTCAACACAAGCTGAATTTACTGGGCAAGCTGGGTCATGGGAATTAAAGGAAGA
TTATGTAGTTGTTCCAGAAAACGCAGTAGGATTTACGATATACGCACAGAGAACTGCACAAGCTGGCCAA
GGTGGCATGAGAAATTTAAGCTTTTCTGAAGTATCAAGAAATGGCGGCATTTCGAAACCTGCTGAATTTG
GCGTCAATGGTATTCGTGTTAATTATATCTGCGAATCCGCTTCACCCCCGGATATAATGGTACTTCCTAC
GCAAGCATCGTCTAAAACTGGTAAAGTGTTTGGGCAAGAATTTAGAGAAGTTTAAATTGAGGGACCCTTC
GGGTTCCCTTTTTCTTTATAAATACTATTCAAATAAAGGGGCATACAATGGCTGATTTAAAAGTAGGTTC
AACAACTGGAGGCTCTGTCATTTGGCATCAAGGAAATTTTCCATTGAATCCAGCCGGTGACGATGTACTC
TATAAATCATTTAAAATATATTCAGAATATAACAAACCACAAGCTGCTGATAACGATTTCGTTTCTAAAG
CTAATGGTGGTACTTATGCATCAAAGGTAACATTTAACGCTGGCATTCAAGTCCCATATGCTCCAAACAT
CATGAGCCCATGCGGGATTTATGGGGGTAACGGTGATGGTGCTACTTTTGATAAAGCAAATATCGATATT
GTTTCATGGTATGGCGTAGGATTTAAATCGTCATTTGGTTCAACAGGCCGAACTGTTGTAATTAATACAC
GCAATGGTGATATTAACACAAAAGGTGTTGTGTCGGCAGCTGGTCAAGTAAGAAGTGGTGCGGCTGCTCC
TATAGCAGCGAATGACCTTACTAGAAAGGACTATGTTGATGGAGCAATAAATACTGTTACTGCAAATGCA
AACTCTAGGGTGCTACGGTCTGGTGACACCATGACAGGTAATTTAACAGCGCCAAACTTTTTCTCGCAGA
ATCCTGCATCTCAACCCTCACACGTTCCACGATTTGACCAAATCGTAATTAAGGATTCTGTTCAAGATTT
CGGCTATTATTAAGAGGACTTATGGCTACTTTAAAACAAATACAATTTAAAAGAAGCAAAATCGCAGGAA
CACGTCCTGCTGCTTCAGTATTAGCCGAAGGTGAATTGGCTATAAACTTAAAAGATAGAACAATTTTTAC
TAAAGATGATTCAGGAAATATCATCGATCTAGGTTTTGCTAAAGGCGGGCAAGTTGATGGCAACGTTACT
ATTAACGGACTTTTGAGATTAAATGGCGATTATGTACAAACAGGTGGAATGACTGTAAACGGACCCATTG
GTTCTACTGATGGCGTCACTGGAAAAATTTTCAGATCTACACAGGGTTCATTTTATGCAAGAGCAACAAA
CGATACTTCAAATGCCCATTTATGGTTTGAAAATGCCGATGGCACTGAACGTGGCGTTATATATGCTCGC
CCTCAAACTACAACTGACGGTGAAATACGCCTTAGGGTTAGACAAGGAACAGGAAGCACTGCCAACAGTG
AATTCTATTTCCGCTCTATAAATGGAGGCGAATTTCAGGCTAACCGTATTTTAGCATCAGATTCGTTAGT
AACAAAACGCATTGCGGTTGATACCGTTATTCATGATGCCAAAGCATTTGGACAATATGATTCTCACTCT
TTGGTTAATTATGTTTATCCTGGAACCGGTGAAACAAATGGTGTAAACTATCTTCGTAAAGTTCGCGCTA
AGTCCGGTGGTACAATTTATCATGAAATTGTTACTGCACAAACAGGCCTGGCTGATGAAGTTTCTTGGTG
GTCTGGTGATACACCAGTATTTAAACTATACGGTATTCGTGACGATGGCAGAATGATTATCCGTAATAGC
CTTGCATTAGGTACATTCACTACAAATTTCCCGTCTAGTGATTATGGCAACGTCGGTGTAATGGGCGATA
AGTATCTTGTTCTCGGCGACACTGTAACTGGCTTGTCATACAAAAAAACTGGTGTATTTGATCTAGTTGG
CGGTGGATATTCTGTTGCTTCTATTACTCCTGACAGTTTCCGTAGTACTCGTAAAGGTATATTTGGTCGT
TCTGAGGACCAAGGCGCAACTTGGATAATGCCTGGTACAAATGCTGCTCTCTTGTCTGTTCAAACACAAG
CTGATAATAACAATGCTGGAGACGGACAAACCCATATCGGGTACAATGCTGGCGGTAAAATGAACCACTA
TTTCCGTGGTACAGGTCAGATGAATATCAATACCCAACAAGGTATGGAAATTAACCCGGGTATTTTGAAA
TTGGTAACTGGCTCTAATAATGTACAATTTTACGCTGACGGAACTATTTCTTCCATTCAACCTATTAAAT
TAGATAACGAGATATTTTTAACTAAATCTAATAATACTGCGGGTCTTAAATTTGGAGCTCCTAGCCAAGT
TGATGGCACAAGGACTATCCAATGGAACGGTGGTACTCGCGAAGGACAGAATAAAAACTATGTGATTATT
AAAGCATGGGGTAACTCATTTAATGCCACTGGTGATAGATCTCGCGAAACGGTTTTCCAAGTATCAGATA
GTCAAGGATATTATTTTTATGCTCATCGTAAAGCTCCAACCGGCGACGAAACTATTGGACGTATTGAAGC
TCAATTTGCTGGGGATGTTTATGCTAAAGGTATTATTGCCAACGGAAATTTTAGAGTTGTTGGGTCAAGC
GCTTTAGCCGGCAATGTTACTATGTCTAACGGTTTGTTTGTCCAAGGTGGTTCTTCTATTACTGGACAAG
TTAAAATTGGCGGAACAGCAAACGCACTGAGAATTTGGAACGCTGAATATGGTGCTATTTTCCGTCGTTC
GGAAAGTAACTTTTATATTATTCCAACCAATCAAAATGAAGGAGAAAGTGGAGACATTCACAGCTCTTTG
AGACCTGTGAGAATAGGATTAAACGATGGCATGGTTGGGTTAGGAAGAGATTCTTTTATAGTAGATCAAA
ATAATGCTTTAACTACGATAAACAGTAACTCTCGCATTAATGCCAACTTTAGAATGCAATTGGGGCAGTC
GGCATACATTGATGCAGAATGTACTGATGCTGTTCGCCCGGCGGGTGCAGGTTCATTTGCTTCCCAGAAT
AATGAAGACGTCCGTGCGCCGTTCTATATGAATATTGATAGAACTGATGCTAGTGCATATGTTCCTATTT
TGAAACAACGTTATGTTCAAGGCAATGGCTGCTATTCATTAGGGACTTTAATTAATAATGGTAATTTCCG
AGTTCATTACCATGGCGGCGGAGATAACGGTTCTACAGGTCCACAGACTGCTGATTTTGGATGGGAATTT
ATTAAAAACGGTGATTTTATTTCACCTCGCGATTTAATAGCAGGCAAAGTCAGATTTGATAGAACTGGTA
ATATCACTGGTGGTTCTGGTAATTTTGCTAACTTAAACAGTACAATTGAATCACTTAAAACTGATATCAT
GTCGAGTTACCCAATTGGTGCTCCGATTCCTTGGCCGAGTGATTCAGTTCCTGCTGGATTTGCTTTGATG
GAAGGTCAGACCTTTGATAAGTCCGCATATCCAAAGTTAGCTGTTGCATATCCTAGCGGTGTTATTCCAG
ATATGCGCGGGCAAACTATCAAGGGTAAACCAAGTGGTCGTGCTGTTTTGAGCGCTGAGGCAGATGGTGT
TAAGGCTCATAGCCATAGTGCATCGGCTTCAAGTACTGACTTAGGTACTAAAACCACATCAAGCTTTGAC
TATGGTACGAAGGGAACTAACAGTACGGGTGGACACACTCACTCTGGTAGTGGTTCTACTAGCACAAATG
GTGAGCACAGCCACTACATCGAGGCATGGAATGGTACTGGTGTAGGTGGTAATAAGATGTCATCATATGC
CATATCATACAGGGCGGGTGGGAGTAACACTAATGCAGCAGGGAACCACAGTCACACTTTCTCTTTTGGG
ACTAGCAGTGCTGGCGACCATTCCCACTCTGTAGGTATTGGTGCTCATACCCACACGGTAGCAATTGGAT
CACATGGTCATACTATCACTGTAAATAGTACAGGTAATACAGAAAACACGGTTAAAAACATTGCTTTTAA
CTATATCGTTCGTTTAGCATAAGGAGAGGGGCTTCGGCCCTTCTAAATATGAAAATATATCATTATTATT
TTGACACTAAAGAATTTTACAAAGAAGAAAATTACAAACCGGTTAAAGGCCTCGGTCTTCCTGCTCATTC
AACAATTAAAAAACCTTTAGAACCTAAAGAAGGATACGCGGTTGTATTTGATGAACGTACTCAGGATTGG
ATTTATGAAGAAGACCATCGCGGAAAACGCGCATGGACTTTTAATAAAGAAGAAATTTTTATAAGTGACA
TTGGAAGCCCGGTTGGTATAACTTTCGATGAGCCCGGCGAATTTGATATATGGACTGATGACGGTTGGAA
AGAAGACGAAACATATAAGCGAGTTTTAATTCGTAATAGAAAAATTGAAGAATTATATAAAGAGTTCCAA
GTTTTAAATAATATGATTGAAGCTTCTGTCGCCAATAAAAAGGAAAAATTCTATTATAAAAACCTTAAGC
GGTTCTTTGCTCTTTTAGAAAAGCATGAGCATTTAGGTGGTGAATTCCCTTCATGGCCTGAAAAAGAACA
GAAGCCTTGGTATAAGCGTTTATTCAAGCATTACGTATAAATATCTTAAAAGGAGGGTCTATGGCAGCAC
CTAGAATATCATTTTCGCCCTCTGATATTCTATTTGGTGTTCTAGATCGCTTGTTCAAAGATAACGCTAC
CGGGAAGGTTCTTGCTTCCCGGGTAGCTGTCGTAATTCTTTTGTTTATAATGGCGATTGTTTGGTATAGG
GGAGATAGTTTCTTTGAGTACTATAAGCAATCAAAGTATGAAACATACAGTGAAATTATTGAAAAGGAAA
GAACTGCACGCTTTGAATCTGTCGCCCTGGAACAACTCCAGATAGTTCATATATCATCTGAGGCAGACTT
TAGTGCGGTGTATTCTTTCCGCCCTAAAAACTTAAACTATTTTGTTGATATTATAGCATACGAAGGAAAA
TTACCTTCAACAATAAGTGAAAAATCACTTGGAGGATATCCTGTTGATAAAACTATGGATGAATATACAG
TTCATTTAAATGGACGTCATTATTATTCCAACTCAAAATTTGCTTTTTTACCAACTAAAAAGCCTACTCC
CGAAATAAACTACATGTACAGTTGTCCATATTTTAATTTGGATAATATCTATGCTGGAACGATAACCATG
TACTGGTATAGAAATGATCATATAAGTAATGACCGCCTTGAATCAATATGTGCTCAGGCGGCCAGAATAT
TAGGAAGGGCTAAATAATTATTTGTTCGTATACATCTCTAGATATCGATATACACCCTCAAAACCCTCGT
TGAATTCGTCGATGAGGGTTTTCTTATCTTCTTGAGTTAATTCAGAAACAATTTTACGGAATGAATTTTG
ATTTAACTTTCTACCTTCATGCGTTACTCCAATCTCATTTAGAAATGCAATAAAATTAGCACGATTCTCA
ACAATATCTTCTCTGGAAAATTTAATCAAAATAGATGCAACAGTAATAATTTCACGAACTGTATCAATGT
TTTTATTCATTAACTATACCACTCAATTAGTTGACTTTGTTATAATATCATCAGACGCTTGATTTGTAAA
CTGGTCTGTGTAATTTTCTTCAAAAATTTTTTCTACGAATTCCTTGAACGATTCACGTTCCTGAGCTACA
TTATGCTCGATTACCTTTTCAAGATTATGACTCATTCGAAATAATCTTCAATTTCATAATCATGGACATA
AATCATTATAGTTTTTAATACATCATCAATATTTTTTCCTGGAGCTGGAATTACGTAAAAATACCCTGCT
TTTGAGAGGTCTTTATAAGTTCCAATCAAGAAATCATTATTCTCAAGATGTAACTCTTCAACTAATTCAT
TGACAATTGAATGGTATAGGTTTGGCAGAAACTTATATAGCTTTTCTAGAATATCAATTTTGAATGTATA
TTGAACCACGGACTGAGAATCAATAATCATAGACCTTCCCCTTATGTTTCTGTTTGCGATTAGATTCTTT
AAACGCTTTCTTCTTATCCTTATGAACAGAAGCTTTATTAAAATTATGCTTTGCGACTAAATTGTTCATA
GTGCTGAATTACCTCTCTTAAACATTTGCATGTGAATGAAAACTTTTTAGCTACACCACATTCAAATATA
TGTTCTCTTAAATCGCGTGTATCGGTATATCCCATCTCAACAATAAAATGCCGTATTAGATTTTTATCTT
TATCGTTTAGAGAATTAAAATAATCAGATTTTGAATTAATTTCCCTGGCCAAATTGAATCACCTTCAGTT
GACGTTTTAACTCTTTTATCATCTCTTCGTTCATCGCAATATAAAGATCGCGTAGAGCAGGTTTTAGCAT
TCCATTTACTGGAGAACTAAATGGACATACATAATCTTTTCCTACGAGCTTTTTAGTGAATTCCATATCA
CAGAACTGAAATCCCGGCTCATTGGTATAAATTCCCCAATTAGTTGACATCATTTTATTGGCATATTCCA
GTGCCTGGATTTGATTCATAATTCCATCAATTTGAAACTTTTTAATATTCATTAGTAAAGGTCCTCAGAG
TAAAGTTCTTTTTCACTACCACGTTCAATACTTACTTGTCCAGCGTAAGTTGCAATAATCATTGCTTCTT
CACGTGTCCAATAATTACTATATTGGTCAATAAACCCTTGGTCATCATCACAAACTTGCTGAGTAACTAA
TTGAGGTTTAACTACATCTAAAACTTCTGCCATATCTTTAGAATAATGACGAGCACCTGGAATAATAAGA
GTTCGTCCATCTTTTAATTTAAAACGGTTGGCTGCGCAAACAATTCGTCGTTGATACTTTTGGTTTTCAT
CCCAGTACGCAGTCTGCCAACAGATTTCAGGAACTTCTTTCAGAATATCTTCTTCTGTGCATTTATAACC
ATGCGCTTTAAATTTTTCAACAAGACTTTCTGGAGTTTCACGAGATAAAGGAACATTCAGCATTTTTAAA
CGATTGATAAATGGGTTCATTTAAACCATCCTTTAATACGCTGCCACAAAGTTTTCTGTTGAGCTTTGTT
GACGCCAATTGAGCGAATAACCGGTTGAGATTCCTGGAATTCTTTATAATCAGCAAGGTAAATTTCGTAA
GCTGCATCCGTAAATGAACTTATCGCTGCCATAAAATTATTGCGAATACCTACTGGAGCATCTTTACTTT
CACGAATGATCATGTATTTACCAGTCTTAATCTTTACGATAGTTCCAAGATAAGCTCCATGGTACCAAAT
ATCCCAACCCTCTTGAGTAGGTTCTGCGCAACGACGAAGTTCATTGACAATTTCTAACTTGTTTATTATT
TATTCCTCACAGTTCAGATGCTACAGTGATTACAGCTTCAATGTTTTCTGCCGAGCGTTTAATGTCAAGA
TACACATTACCGTTTTTAGCGATTTTACATGACATTCCGATGTCAGTAAATTTCTGAATATGATGTTCCA
TCATTTTGTATCCAAAAATTCGCATATTTCCATTGTTATTAATTTCAAAATTACGAATTCCGTTAGTGCG
TTTTTCTAAAATAGCAAGATAATTACTACGATAAATTTCAACCTTTTTAAGAACAAATCCATTTTTATCT
AAAAGTTTTAACATGAGGTCTTTATCTTCTTCCATATCGGAAGTAATCTCGCGAGCTTTACGAGTTGCTC
GTTTTTTCAGCAGTTCCGGAGCATTTTCCTGTGCATATAAAGTTGCTGCATTTGAAATAATATCCTGAGC
TTCACCAGTAATGATTAATCCATCACCAGATTTCTCCACCAGGCCTTTTTTAATCAATACCCCAATATTA
CTATTAACTACTGCGTTACCTAAATCTGGATGCACCTCACGAACTTCTGCAGCTGTAATGAAATCTTTCT
TAGCAATGGTAATTAAAATCGTAGCAGTTTTTTCATTCAGAACATCGTTAGAAGCTTTGATGATGTAAGT
TACTTTAGACATTTTCTAATCTCCGTAATTCTGTATCAGTAGTTGATAGTTGTATAGTACCACAGTATGC
TTTGGTTGTAAACCGTTTTGTGAAAAAATTTTTAAAATAAAAAAGGGAGAGCCTCGGCTCTCCCTAAAAT
TACTGCATGACTGTGATAACTGTCATGATAACACGTTGAATTCCGAACGCAAGAAGACCTCCTGCTACGG
CTGGAACAACGCCTAAACCCGCCAGTAAAATGCTACCAGATACTAATGCAGCGCTTGTAATACCAATGAA
TGGACTCATTTGATTTCCTCTAAATCTTTGGTGTATTCAGTAACTACATCAGTAGTTTTCCAATATTCGT
TTTCTTCTTTTTTAGCTTTAGCTTCTTCAGCAAGTTTCTTTGCTTCATCGGAAGTCATATGAAAAATATT
CATTCCAACTAGTTTATCAACATAAGAAGAATACATATCGATTTTCGAAAGTTCTTCGGTCAGTTCTTTA
CGAGTTTTACCCTGTACAACAATTTCACCTGAAATTACTTTCTTAATGAAATGTGCTTTGGCAAAGGCTA
AACGAAAAGCTGACTCAGTTTCTTTAATTTTGTTATCAATTCGTTTTTGGACATAAGTTTTACGAACTTC
AACAAAGTCTTTAATTAAATCAACTACGTTATCGTAAACTTGCAGCTTTCCTTTCTCATTAATAACCGTA
ATATTCTGGGAACGACGCTCAATCAGTCCGAAGTCTTTCATAATTTTTGCATGGCGTTCTTCTTCGTTAT
CGCTCAAAGAATATTCTTTGCGGAATTTAACTTTGAAGCCAAAACCATGCTCACCACAAGCATCATCCCA
TGTAATGAAGCCTTTATTTTCAAGTGGGTCTAAGATTTTACTCACATAAGTTTCACGATCATACTTATAC
GGAATCTCAGTGATATGCATTTGAGTTCGTGAAGTAAACTTATATGTTCCACGAATTTCATATTGCCCAT
CAATTTCAACGACTTCACCACGAAATTCTGGGAATTCTACTTTCGGTTTAGTTACTTTCTTTCCTTGAAG
AGCTTGCAGTACAGCTTTCTTGACAGAAGAAACACTATGAGGAAGAATGTAAGTTGCATAACCAGTTGCA
ATACCGGAAACGCCATTAAGAAGAACAGTAGGAATAATAGGCAAATAGAAAGCAGGCGGAATGTGTTCTT
TATCTTGATGTACCGGAGCATATTCAGTATCTTTATATACGTTATAGAAATTTTTACTTACACGAGCAAA
AATATAACGACTTGCCGCTGCCTTTTGGACAGTACGAGAACCAAAGTTTCCTTGACCATCTAACAGAGGA
AAGTTATTATTCCAAGTATTAGCCATCAAAGCACCTGCGTCTTGTGCAGAGTTTTCACCATGATGATATC
CAAGGTCCGCTACACCACCTGCAATAGAAGCGAGTTTGTGAAACTTATCTTTATTTCCTCGTGCCAAATC
AAGAGCTCGAGCAATAACAAATCGTTGAACTGGCTTAAATCCATCAATCATATTTGGGATAGCACGATTT
TCAACCGTGTACATAGCATAAGCCAATGCTTCATTATCAATGATACTTTTTAAATCGCGATTATTCAGTT
GCATAAATTTACCATACTAGTGAATGTAGTGCCATAATAACATCAGAAATGAAAAGCACGACTTGAATTA
ATCCGAACATTACTCCGTAATATAGTGCTACCAATAAAGCAGCAAGGGCTAATGAATAGCCCAAGATTTT
CTTAATCATTAGATAACAACACAAATGTTAAATATGCACACATACCCTGGGCTAAAGCTTGTGAAAACAC
ACTGCTAGCATCGATACAGATAGTTAAAACACATGCTACTATCCAACAAATAAATGAAATAACTCCTAAT
AATTTTGCAATATTCATATTTTCCTCACTGGCGTCCGAAGACGCCTTTAGTTTTAAGATTGTTACGATAG
AACTGCATCACGTGTTCGTTATGGAAATTACTCATTAATATGCCTGTAAAACAAATTTAAAGTTATCAGC
CAACATACGGTTCATTTCTTCGAGTGTTTGATACTCAGAATGATGATTACGAGTAAACGCCAAAGCTAGC
TGACCTTTTCCAAATCCCGTCGTTAGAGGTTTCATCTTAGAAGCAGGCAGATAAAACACTGTGTATGGAA
CATTGTTATTTGCAATAGTACGCGCAAGTTGAGACCGGCGTTGACGAATATGACTTAAAACCGCACTGAA
TCCTTGCTTAGAACGCTGATTACCTACATAAAATCGTGCAGATACGCATGGATTACTAAATGGACCACCG
AGTTTACTCACTAAAAAGTAAAATCCAGGTTTAGATAAAATATCTTTATGCGGAGTTCCTAAAAACCATT
CACCACCCTTGATTGTACCAATAACAGTAGCGCCTGCATCATTCAGATCAGTAACAGTCATATATTTCAT
ATTAATTTCCTCTAAATTATTTTCTACTCCAAGGCCGCATGAATACACACGGCCATTAAATTACTCGTCG
CAGTCGACGCTCAATTCCCAAAACTCTTCTACAGTATAAGTTTCAGTATCATTTTCAATACAGAAACGTT
CATTACTATTATTTGCTAAAGTAGCATTAACTGTCATTTTTTCGCTAGTGCTCTTAAGAGGTGAAATACG
AATTAACTGATCACCGTTATCTAAACAAAAAATTTCACCAACTTTTACATCTTTAAAACTTTTCATAATT
CACCTCAAGGAGTATAAAATCCAAATGCAGTTGTTGACCATCCCATCCAATATGGAAAATTTACACCAAT
GTAAAACATAAGAATATAAAACCAACCGCTCAGCAAATTCATCATTTTACACCATTCCAAATTGTTTCAA
CCACGGATTTTAAACCATTTTGATGAATATCCATTCCTACTACCGCCATCAAATAAATTCCAACTACAAC
TGAACCTAAGGCAAAAATCAGCATGAAAATGAATAAAGCCGGAAAAATATTATCGAAAAACCATTCAATA
AATGTAAAAGCACTGCGTTTACGTTCATATTTTCCTCACATAAATCCAAAGTAAACGTTTAATACATCAA
TCATTAAAACGATTGGGAATATACTCAAAACTATTAGTATTATAACTACATTCCATATAGCTTTAATAAT
CTTTTTCATTTTCTGTTCCTCCATAGTTGATAGGGTAATAGTACCACGGAAGAACAGTCTTGTAAACAAC
TTTTTTAAAAATATTCGTAATAAATGTGAATACCAACTACTACCGCTGAAACCTGTGCAACCCACCACGC
ACAAGCAATAAGTACAGAATTCAAAATTTTCATAATAACCTCATTACAAAAGTAAATGTTAAACAAATTA
CTGGAATACTAATTAACCAAACAAAACACCACCATAATGAACTCATAGTTCAATCTCAGCGATTTTCATT
TTATTCTCCAAATCCGTATCAGTAGTTGATAGTTGTATAGTACCACGGTCCTTGTGGTATGTAAACTGTT
TTGTGAAATTTTTTAAATGGAAAGATACCATCCGTTGTAGTTGCTTTTTCTTACAACTTTACGAAGGTCT
TCTCTGTCACCGATGAACTTCGGAGTGTACTGGATGACACCTGGATGAATTTCTTTAGTGTTGAATATAA
TTATACAGTCAGCGACTTGATGATTTAGAATGGGCCCTAGATTTATTCCAGAACCATATGGATACTCTCC
GCTGCATCCCGTTGTTACCGAAATCCAACGTGAGTCAGTTTGATGTGTCTTAACTTCTACACGAAGCCCG
CAGTATTTTGGATGAGCCAATACATCCCATGCATATGTGTACGGATCATCGACATCCTCTTGGCCTTTAT
TGACATATCCACTCAACCAATCTGCCACAAAAAACTCTGCGTACACAGCGATACGGCATCTTTCGATAAC
TTCTGCCTTATCTTGATTTGGGTTTTGTTTTAAAGAGTATCTTGCAGTATCAGCAATTTTGACCTTCATT
TCACAGGTCAAGTCACTGTTCGATAGGGTAAATGTCGGAATCTGAAATAGTCTCTGTAACCCAGGATTCG
TTTTCTGCATTTAAACTTTCCTTTATGTCGGAATCACCGATATTCATATAAATCATAATTTCTCTTAAAA
CAAAAGGCCGAAGCCCTTTATTTTACTTGAATTGTGCAATTCTTTTCTCTAGACATTCAGCATAAGATTT
CATTGAGATGAACTGCGAAAGTAGCAGTTCTTGCTCAACTGCGCTAACTGTTAGAAACTTTGCGCTTTCT
AAAAATTTGCTCAGTGCATTAATTTTGAGCATTAATTGATCGTATTCTTCTTTTACTCGTGCTTGATAAG
CTAACATAATTTTCCTTAGTTAAGGGCCGAAGCCTTATTTAAATTGTTCAGTAACGTCTTCAACTACTTC
ATATTGGCAGGTACGCATTTTAGCATCGTTGTAATCAATCGGAATTGATACTACATCGCGAGGATGAACT
TTAACTTTTACAACTCGGCTGGTTGAACTACCAAAGTGACGAATATAAGATTTAGAACACACATGCAAAC
CACGAGAACAAGTTTGTGTATCATCGTCATTCACACGAGTACGTGGCATTTTAACTACTTTACCCGGACT
GTTATCAAAGGTGTTTGAGTGACAGTCAAAGTAATTGCTGCGAACTACTTTCCAAGCATAGAAGTAACCA
TCTTCTGTAATTTCAATATCGTTTGCTACCAAGAAATCAAAGAGTCGAGATACCGCTTTTTGGCTTGGGT
TTTCCAACAGATTTTCCAAGAACGGAAAATAAAATTCAAAGTTTTCGCCTTTTTCCATCGAGTCAAGAAT
ACGATCAACCAAACCAGACCGCAATTCAATATTTTGATAGAACAAGCTTCCACCTTCAATTCGAACATCG
CCGGAAATATATTTTTCAACAGCACGACGAACATTAATTTTTTGTGCCGCTTCTTCCAACTTATCCGCTA
CAAGCAGATTAAGAATTTCCTGGAAGTTTGAATGAGTATTAGGAGTTGCGTTATAAGTTACGCCATCAAC
AGTAATTGAAATGAATTTTTTAGATGCATTCCAAATAATGTCAGATTTAGCAACTGGAGCAATAACTGCA
TCGCTATTAACTTTAACTGTAATATCACCGCTAATAGTAACTTTAGGGCGTTTAGCTTCTTCAGCATTTT
TCAAAACACGACGGATTGTGTCAACCGATACACCTTGCCAATCAGCCAATTCCTGTTGGGTGTAATTACC
ACTTGAATACAGTTTAACAATTTCAGCTTGTTCGTTTTTGGTCAGGCATTTAATATTGTACAT
Spacer targeting E coli fimH (SEQ ID NO: 6)
CGAATGACCAGGCATTTACCGACCAGCCCATC
Spacer targeting E coli bolA (SEQ ID NO: 7)
AGTGGGAAGGGTTGCAGGACACCGTCTTTGCC
Spacer targeting E coli rpoH (SEQ ID NO: 8)
CCGATGTTACCTTCCTGAATCAAATCCGCCTG
Spacer targeting E coli lptA (SEQ ID NO: 9)
TGATTGACGGCTACGGTAAACCGGCAACGTTC
Spacer targeting E coli murA (SEQ ID NO: 10)
GCTGTTAACGTACGTACCGCGCCGCATCCGGC
Escherichia phage T2 DNA, complete sequence (NCBI Reference Sequence: NC_054931.1)
(SEQ ID NO: 11)
AATTTTCCTTATTAGGCCGCAAGGGCCTTCATAGTTTTAGCGATTTGAGAAACTTCATCATCACTTAAAG
AGTTGCGATATCCGATGAAGTCGGAAACAATACGGAATTTCTTGGTAAACTCAGCAACCATTTTATCACT
GTTTTTTGAAGCATTATTTGATAATACATCAAAAAGATTAGTTACTGTCCAGATGTCATGACCAATGGTA
TCTTTTCCACCATTAAAATATACACCCTGTAATGAACTAACCATATTAGCGAGTCGTGTATATTCTTCAG
AAACTTCATCTACACTGAAGTACTTCATCATAAAATCTAGCTCAGGATACTTGATAATTTTATCAATATA
TCGTTTAGCTGAACTTGAATAACCTACATACTTATCATAATCTACATCATCAAAAGCATCTACATATAAA
TCGCGTAGAGTTTCAAAAATACATTGGCACTGACCGAGTTCTTTTACCTTTTTCTGTAAAAGCGGACGAA
TAACATAAAATTCATTAATGCCAATAAGATTAGCCATACGAATCAAAATATTCATAGATGGATTACAAAG
AGATGTAGTACCATCCATAGAGAAAATATCAGAACGATGCATATACGCTACATAACCAGTAATTTCATCT
GCTTCTGACGTAAGTGTAAATAGTTCCTCTTTTTCCCAGCGCCCGTCTTTAATTTCAAACTTAAATGCTG
TAGCAGCTTTAGGACGAGGAGCTTTACTTTTAACTACCTTTGGAATATAGCTTTTAACTAAAGCTTCGAT
TTCTGACAAATAATGAATGTTAACTTCATCACTTTCAAACATTGCCATAATATCAGGAAGCAAATCAATC
TGCGATTCTACTTCTGGGTTAATAAACAGAAGACGCTCATTGTGATGAATATTCAAAGTGTTATTAAATT
CACTATCATCTAACGCACGTGCTAATCCACGGACAATATTAACACGATTTTTAATATTATCAATAACAAT
ATTAATTTTTGTTGTATTAATACCAAACAGACGATAACTTGATGCAACGGCTGAAGTTTCATGACTTTGC
TTAATGCGCTTCAGTCGAGGGTCAAGATTTACTTCATACACAACTCCTGCATTGCATAACTTACTATCAG
GTTCAAACATACTCTGCATCTTCTTATATGACAGATTTTTAGTCGTGAATTTGACTGAATTACTAATCAT
ATAATCTCGAGCAGAATACCCCATCTTCATCAATTCACGATATGTGTGACGAGGAGATGTAGATTCTTTA
AATCGTTTTACATCTTCATTAAATGCTTGCTCACTGAGTTCTTTAACTCGCTCAATAATATTTTTACGAG
TACGATCATCAAGTGAAAGAGCCTCGCGAGATGGAGCAATATCAAGTGAACCCATTGGAAACTTAATGTA
ATTCACTTCATTGCGAATGCTTAACCAGTTGCGGTCTCTAATAACACCATCAATAGGATAAACAATACCG
CCATAGATAGCATATAATCCACCACGATCAGGCCAGTATCTTTCTGGATTTACGCCGTAATAATCATCAA
AATCCGGAAAATAGTCAATTTCACGGTCAAGACTATTAATGATAGCCAAATCTTTGAACGGCCGCATGAT
ATAAGAAACTTCATAAGCAAAGTTTCTAAAGTCTTTTTCTTCAACTGGAACTACGATTTCAATGCCAGTT
TTATCATCTGGACCCATTTCTTTTACGAATGTAGGTTTAATCTGTGGGCCATCACCATCCATGTAAGCTA
CATAACCACGAATTTCACCTTTATGGTATGAAGTAATACTAAACGTATCAGTATAACTAAACGGAGATTT
AGAACCTAAACCAAATCCACCAATGAAATCATTAGATTCAGCTTTAGATGAACTGAAGTATGAATTATAC
AGCCCAGGAGAATTATCATCACCCTGAATATCAAAATCACTCATACCCGGACCAAAATCTCGACAAACAA
ATCGCGGATCTAATCGTCCTGGAACTTGAATGATAAATTTTTCAGGATTTCCATTGAGAGCATGGGCATC
AATCATGTTAGTAATCAATTCACGGACTACTGCGCGAATTTTGTTTGTATACAAATCAGATGACAGAATT
TTAAATACTTTAGGAGATGCTGTGATGCTAAATGCTTTTGATTTAGAACCATTACCAAGAATTGTTTCTT
TTTCAGTGGTGATAATCATAATTTCCTCATTAATTCATATTACGCTTAATAACTTCAGCAACTTCTAGTA
ATTCATCTTTAGTTGCGGTGTCGGATTGAATTTTATCTCTAATATCCTTAAAGCGGTTTTTAAATTCTTC
GGCTTCTCCCATATCGAAAAAGCGTTGAATGATTCTATATTCTCGATGAACTGCTTTATCAAAAAGTTCT
AAATTTACTCTATATGATTTCATTTCAATATCCTCATTTGCCCAATTAATTATACCACATCCTTGTGGTA
AAGTAAACTACTGGCTCATCCATTCTTTACGAAGGTCAGCATTATCTCCCATGAGCATTTCAAAAAGCTC
TTTCCAGTTCTCAGGAAGTTTAACAACATCATATACTGGATTTTGAATCATTTCACGATATTCAGATTTT
TCCAAAGAGCCAAGTCCTTTAATATAACGGATGCTATGTTTAGGTAGAGCATCTTTGGCACTCTCATATT
CAGCGACTGTATAAAACCATTCTTGTTTTTTACCGACCTGAGCGATGATTACAGGAGTTTTGACAAAGCG
AATTCGTCCTTGCTCAAACAATTCTGGCCAATTACTAAAAAATCCGAGCAGAGAAGGATAAATGCTTCCT
AGACCATCATGGTCAGCATCAGTCATAATAGCAATATTATGATAATTCAAGTTTTCAGCTTTTTCACCAA
GAACTAGACCAGTGATTGCGCAAATATCAAATAGTTCTTTGTTTTTAAGCATATCGGCATATGACATACC
CCAGCTATTAAGAACTTTACCACGCAATGGATAACCACCATGAAGTTCTTTATCACGAACATCAATAAGA
TATCCGATAGCAGAATCACCCTCAGTCAAGAAAAGAGTAGTATCAGCATCTTTACCACAAAGATTCGCTT
TGATATGTTTATGAACCTTAGCTTTAGAAGCTTTTTTAGCTGCCTTTGTCTCTGCTGCTTTTTCCGCCGC
CAATTTACGAGCTAATGCTGCTTCAATAATTGGCATTAAAATTGCTTCATTATTTAGAATAGCGCGTGAA
ATCTTTTTAGCATCAAGTTGAATATGACTACGAATTTCACCAAAAGGAGAAGTAAGTCGTTCTTTAGTTT
GAGAGTCAAATCGCATGTTTTTCATATCGCGAACAAACATAACGATAGTCAAACATTCTTTAACACGTGC
TTTAGTTACATCAATTTTGAATTTACGTTTGATTTGTGGAATAAGGTCTTCACAAATATCATCCATAACA
CAGTCAATATGATGGCCACCATTCTTAGTATGAATGTTATTGACGTACGTCAACTGACGAAAACCATCCG
GTGAACGACCAACCGCAATAGAACAATTTTCTTGTTCTTGAACAATAGCATGTTCATCATACTGTCGTGC
ATATTTCTTAAAATTGCCCTGAACCTTTTTACCATTAAAGGTAAATTGAATATCAGGATAAACTACAGCA
AGCGTCTGGAGACGATCAAGTGTAATGTCAAGATAAACTTGGGACAGCTCATTAGTTTCAAATGACATAA
AATCAGGAATGAAAGTAACACGAGTTCCTTTCCATTTTCCAGGAATATCTTCCCATGATTTATTTTCCAT
GCCATTTGAACAACGAACTACAATATTATTTTGACCATCGCCAGTTTCACCGACAAACATCACAGAAAAA
ATGTTTGTCAAACTAGAACCAACACCATTCATACCACCGGTGACGCGTTCTTTATCATCACCAAAGTTAC
CACCTGCTTTTGGAATAGTCCATGCAGCAACTGGACCAGGAATTTCTTCACCAGTAGGTGTTTTAACCAT
CGCTTGTGGAATACCACGACCGTTATCTTCAACTGTTACTTGATTGTTTTTAATAGTAACATTAATTTTA
TTTGCTAATTTAAACTTAGTACGAATACCTTCATCTACTGAGTTATCGATAATTTCATCAATAAGCTTAA
CAAGACCAGGTACATACTGAACACTTTCCCATTTACCAAACAGAAAGCGCTCATGCATTTCATTAGCAGA
AGAGCCAATATACATGCCACTACGCTTTTTGATGTGTTCAATATCGCTCAGAATTTTAATTTCATTCTTA
ATCATCACTTATCCTCGTTTGGTTTCGGGAATATTATACTCCAATAATCATAAAGCTAAAGGCCCGAAGG
CCTTTTATTTAAAACGGATAGTCGAATCTTTGAAGAATAAACCAGAACATACTGTTCCTTCTACTTTCTG
CCCGGTAGGTCCAATAGCACGAAATCCAGTATGCTGGAAATCATTTTCAGAGCAACCAAACCAATTATAT
CCAGTGATTTCAATATTAGTAAAACCACTTGAAGACAAAACTTTTGTTGCATTATCAGCATCAGTACATC
CTACTAAAGACACTGCTAATACTAATGCTGCGATAGAACGATTAATATATTTCATAATTTTCACTTAAAT
TTAATGGCTTGAAGAAGACTAATAATTCTCAAGCGACTTCTTTCATCTAACTGTAAAAGAAAGAGGGTCA
CCAGATTTCATAGTAATAGTACATTCAAAATCAAAATCTTCGGAAACTTCTTTGAAGAAGTCAAATTCTT
CATCATAAATTAGAACATTACTCTGACAACTATGAAGAATTTTTCCATCATTTCCAGATGCTGTACTAAT
CATTGTAACATTATGACCTTTCATATCTTCAACGATAAATTCACTAGTCAATATTACAGCATTAATAGAA
CTATTCCTATTACTAGCAGAAAGTAGATATTTCTGTTCTTCACCTTCACGAATGCAATATTTCTTACCGA
TTTTAAACATAATTACCCTTTAAGTAAGTCGTAAAAACCACCATTCACATGCTTAGGAGCAGAAGGCCGA
CGAGTAGACAAACGATGACATTTAGGGCAAACATCATTTTCTCGTTCAGAAATCTTTTTAATTTTTTCAT
ATTCATGCCCGCAATCTTCGGATTGGCATTTATAATCATACATTGGCATAATTATTCCTTAAAGTGTGCT
TTCAGCATTTGATACAAGGACCATGCCTGTTCATTATTTTCAATAGTAACTTTCATTACTGGGAATTCTG
TGAAATCTTCTATTTGTTCTTGCTCTTTCTCTTCCTGCTCTTGCTCTTCAACTGCCTGATATGGATTTTC
CACTTCATCAAAGAACCCAGCTTCGTTAGTAGAAAGCCAGATAAAGTTTTCGTCAAGGATATCACCGTGT
GTTGCATATCCAACTGTGCCAGTAGATGTCACAATTTTAGTAGGACGCCAAAGATAATCAACATCTAAAA
TTTTAAAAGGATGCATACCTAAACGGCGTGCATAGATTCCGTTATCAGTATGGTCTTTAATAAAATTTTC
TTGAGCTTGTTTATTTTTAAATTGATACCATTTATTAACTTCAAATTTAATAGCCATTAATAAATTTCCT
TCCAGTAAGTTGTGCCATCTTCAGTAATTTCACGAAATACACCGTAAATTGGTTGTTTATCACCGACTTT
CTCATACACATAAACCGAAGTCAAGTGAGTAAACTTGATGGTGTGTTCCTTTTGAACTACTACCAAATCT
GGATCGAATAATACATCTTCAAATTCATCATTAGTGCAGTTCTGAACAATTTTACGTTTCATTATAATTT
CCTCATTAATTGAACAGTGGAGCGATACGTTTCAGAAGAGTAGCAGCACCTTTAGCGAATTTTACATCAT
GAAAAACAGTTTCTTCTTCTGTAACAATTCGAACTTTAATATTTTCACAATCCCAATTTTTGCGAACAAT
CTTCAAAAGCTGCAGTAAATCTTTACATTCAGCAATATCGATAACACATCCACGAGAATCTTCCATTATC
GCACGATAACCATAAGCCATACCATAATCGTTGAAAGATTGCTCGATGATAATTAAGTTTTCCATTTTAT
TCTCCAAGTTGTTTTCTGTATCAGTAGTTGATATTGATATAGTACCATAATCAACTACTGATGTATATAG
TTTTATGAAAAAATTTTTAAACTTTATGCATAGCGAGCTTTGCTATAGTGTTTAATCCAGCTTTCAGGAA
TGACTTTGTATGTTCCTAAAAATACCGCGTTATATAACTTAACGCCATCTTCTACCCATTGATCAGTAAT
GTATGCACACATAGCGCGAGTACGGTTAACAACCCCTTCCTCACCTTCAGTAAATTCAAACTCATAAGGA
GCAACGAACTTAATGGCCTGACCGAGTTTCCACTTAAAGTCTACACCTACATGCGAAGTATCAATCGTTT
CAATTCCTTTAGCGGGAACAGCTTTCAAAAACGCAGGCTCAAGAAATTTCCATCGAACATAACCAAACTG
AGGTTTAGACATTCCATCTTTAGGAATGATACGCACTTTTACTTCAGAATCTTCATCTTTAACACCATGT
TTAAGCTGAATGCTTACAACTTCAACCAATTTTCCTGCTGCTTTAGAACGGGATTTATCAGATACACGAG
CAATTTCACCGATATTAATATTCATAATTATCTCTCACTTGTTAAAAAGATTTTATACTCCGCGGGACCA
TTATACTCTGGTCCCAAGAGTTTGTAAACTTAATTTAATTCACTAAACGATGAATTCAACACGATAAATT
TTCATTTTATTATCCTCAGTAGCTATGGTGTTATAATACCACAACTAACCGAGGAAGTAAACAACTTTTT
ATCGTTTTGTTGGAAGAGATAGAGGATCGCATTCTTCCTCTGATGGAGCATCTTCAAGACCCATAGCATA
TCGCAAAGCATACTTCATCATCAGGATGTCTTTCGCACAGTCATGAATAGAATCATGCGCAACGAATCCA
TCTAAAGTTCCTTTTGGAAGAGGACACGTGGTCATATCACGAACAAGCAGAAGTGCTTCAATTCTGGTAC
GAATATCACGCTGATTCCAGAATTTACATGGTTCTAACTTAAATGTGTCAAGCTCATTCTCAGATACACC
ATTAAGGCGTTGAATATCACGAATGAGATCGACTAAAATTGGAAAATCAAATGACATTCCACGACACCAG
CCTTGAGATTTCCAAGGATCGATATTATGTGCATTGATGTAATCATTAAATTTTGCAATACCATCGATAG
TGCTTACATCTTCATCTGATGGTGCAATATTTTTTCGAGCTTCAGGAGATTGATTTTTCCACCATTCGAT
AGTGCTTTTAGTAAAAAGACGATGTCCTTTTTGGCTTTTTAAATCAAATTTGATTTTAATGCCACGTGAA
ACTAATTCATCGAATGTTTCAACGACTTCTGGATTAGGGTCAAAAGCAATTACAGCCAAATCAATAACAG
CTGCTTTTTCACCACTTCCCATTGTTTCAAAATCTATAATAAAATCAAACATTAAACTTTCCTCGCTAAA
TCGCGAATTTGACCTACAGTATAGTCTTGAATATAAACTTTATTAATAGGCTCATCAATAAATTTTGCCA
TAGATTCAATATCTTTTTGTATTTCTTCAAGACTGTATACTATCTTTAAAGCTTTTTCGCGAATAGTAAT
ATTTTCAGGACCCTGATTTTCTTCAATGACAGCTTTAACATTTGTCATAAGAGATTTAAACTGGCACCAA
CTTAATTCAATCATTAATAATCGCCTCATAAAGATAGCTAATTTCGCCTAAAACATAATCATTAATTGTA
ACAGTTTTCACTTCGCCACAAAAGAATTCTAACGCAATTAAATCTCGTTCAATTTCTTCTAATTGAAGCA
TCAACTTACTAGATTCAATTTTTACAGTTTCACGATTTTTACCATGAGCAATTTCATAAATTTCGCTTAC
TTTATCTTGAAGAAGATAAAACTGATCTTTAGTTATTTCCACGAATAGCTTCCTCAAATTTAATCATACA
TAAAATACATCATAACGACCACGGGTAACACCAACATAAAGAAGTTGTTGAGCCAATTCAGCATCTGCAT
AATGAATACAAGGTGTATAAATGAAAGCACGGTCTACAGACATACCTTGCGCTTTATGGAATGTTGATGC
AGGAAGTGCTTTCACTTTACTGAACTGTGATTTAGCATCCCAAAAATCACTCCATGGAGCTTTTCCACCT
TTGTTCCAATTTTTATAAGTTTCTGCTGTTTTACCTAAAAATAGGTTAAACTTATATAGTTCTTCATCAG
ATGAAATTATTTTAATCTTTTCACGATAATATTCATCATCGCCGTAAGTTTCTACTGTTAAATCCCAATG
ACGAATTAAGTATTCTCCAGGAACACCACGAGCTTTAACAAACGTTGATGTATACTCTGCTTCTATAATA
CGAACTAATTGTCCGTTATTAAAAATAATTTCTGACACAGGCTTTCCATCAATTTTATATGTTTTAATTA
ATGGTTCCTGCATTACAATAATTTCACCAACAATAAAATCTTTATCAGTTTCAAAAATCTTTTTACGAAT
AATGCTATTTAACTTATCAACAGATTTATTCGTAAATGCCATTACGCGATTTTCAAACAAATCATCTAAA
GATTTGACGATTGAAAAATAATTTACCATAAAATCGCGTAAAGCGGTATCACCAGTAAATCCACGTACTC
CATGCCCGTCAACAACTTTATCATAAATCCACTTACCGTTACGAACGTCAGTAGCTACATCAATAATAGG
AGCATTACTGCGTTTAACTTCAGTGAGTTCACACTGATAAAAATCTTTGTGTGTAAAGAATGGACTGATA
TAAGCAGTATTTTCTCCTGGGTCAACAGGTCTAATTTGCTTATTATCGCCTATTCCAATTATAGTACACC
ACGGCGGGATAGTTGAAAGCAGAATTTTAAATAGCTTTCTATCATACATTGACACTTCATCGCAGATTAA
TACCCTGCATTTAGCTAAATCTGGTACTTCTTTTTGTTCAAAAAGAACGTTTTCTTCGTATGTTACTGGG
TTAATTTTAAGAATACTATGAATAGTACTCGCTTCTTTCCATGATAGTTTTGAAAGAATCTTTTTAGCTG
CATGAGTAGGAGCTGCTAAAATAATACCAGTTTCACCCGTAGATATTAAAGCTTCAATGATGAACTTAGT
AAGAGTAGTCTTACCGGTACCAGCAGGTCCATTAATAGTTACATGATGTTTCTTTTCTTTAATAGCCTTC
ATAACAATGTTAAAGGCATTTTTTTGACCTTCGGTCAAATCATCAAATGTCATCGTAAATTCCCTGCAAT
TGGTATACTAACAATACGCCCAGTATCTAAAATTCGCCGATATAATCTTTGTGTGTCTACATCAGGCTTA
ACATGTTTAACTTCTATTTTATTAAACCAAAACTTGCGTGGAGTCTCAACTAATCTTGGAATTCCCTTAC
CTAAAGCTAGTTGATACTGCTCTTTAAGAGTGGTAAATACTTTATCAGCAATCTTCCATTCAAAAAATAC
AGCAGGACGATGTTCATCAAGCGGAACTGGCGCCGTAAATCCGTCTTTGTCTCGGTAAACTATCGCATAT
ACATAAACCATATTATCCTCGGATAAGTTTAAAAATTGAACAATTTAGCGGATATCCTCTTTTCAGTTTA
AGTTTATCAATAAAAGACAAGTTTTGATACCGCTCTACACCTTGAATAATTTTATCACACATATCATATT
GCATTTCTGCTTCTGACAACTTTTTCACAGTTTTCCAATCCGAGCCTTTAAGAAGAACGTTCAATTTAAC
AACTTCAGCGCCTTCTGCTATACGAGAACCATCAATACGAGCTTTAAGTGCTATAATTCTTAGCTTAATG
TCAGAGGTCTGTTTTGATTTAGAAAGCTGAGAAATGTGTTCAATTCGGTTTTCACGTTTTTTCTGTATAG
CTTTAATTTGATTATAAGTCTTTTTGATTTTAGCCCATTTCTTTTCATCTAAATTTAGTTTATGAACTTT
TTTCGCAGATGAACGACCAATTCGCAAAGCAAACAAATCACGTTTTTCAATTAACTCCTCTAAAGTATAA
TCAGAACGAAATGTATTATACTTTTTCTTTACTGCAATAACATTCCCTTTAATGTATCCAACGTTATTAT
CAAAACGTTCTAATGATAATTTCTCTCCTTCAATACGATTATCAAAAGGTTCTCCCGAGTAAGCGCAAAC
TTTTTGGTCTAAAATGTTCTTAATGTAATTGAAGTCTAAGTTAAAATCTTTAGAACGTCTTTTAGCAGAT
GCCTGAGTATGCTCTAAACGACGTTTAATTTTACGAATTTGATTATTAGACATATTATGCAGCTTCATAT
TTTTCTCACATCTTACGGACGGTTAACTACTTATACTATAACATTTTTACTTTAACTTGTAAACAACTTT
ATGTAAAAATGCTTTAAAACTTTCGTGGTATAATGAATCTAAGTCCTTCCATTATAGATTAAATCTTTCA
AAATCAAGAGTATAGATAGTGTATGTTGAACACTTTTTGTACTCATATCTATCTGCAATTCTAAATACAC
TTCCAGCTGGTATCATTACTTCTTGTTCATCTGAAACTAATTCCATATTACGATAACGATGACTATCCGG
AAACTTAAAGTTTGGATTGTATTCTTTACAGCGTAGAGCTTTTATAGCATACTCCTGGAAATTGAATACC
ATAGGAGCTTTGAATTCAAAAATAACTTGTGTGTTATACTCTAAACCGGAAGCAAAATGTAGAGCTATAT
TTTTATCATATGAAGCTGATACTACTTTATCAAATGTAATAATATCAATTCCTTGATTTAATAATTGTTT
AGTCTCAACTGGAACACCTCTCCAAAGAGGTTTATCGTTTGGTTCCAAACGAGATTTGATTATTTCATTT
AACCAAGTATGGTCATCTGGTTTGTTGGTAATACAATGAATTAAAAGTTCAATTTCAGATAAATTAAACC
CTTCAGAAAGTAATTCTTCACGAATAGAAGCACGCACCGATGCATCCATTGATTTTATTTTAAAATCTTT
TAGTTGCATTACTGAGTATTTCATTCAACTACCTCAATATCATAAACTTTAAGTGTTCCAAATGAATCGT
GTAATTTTTCTTTTGAAATAGAAGTTATTCTATACTTTCCAATTGGAATCATCCATTCTTGTTCACGCAC
AATCATCATTAAGTTATCAGTACGCTCTGAATCTAGCCCATCAGTATCTTCATACGTGTACTTAAACTCA
GTATTAGGAGAAGAAAGTATAATATCGCATATGGTCAGAATAATTAAAAGCTTTATCAGTTTTTAAGCGA
AATATTATTTCAGTGAAATACTCAACATAAGAAAAACCACATGCTGTGTGCAAACTGGTAGTAAATGAAT
CTACTCTGTTCGTTGAAAACACTTCTCCAACTTGTAAATCTTTAATAAGTTCTTTTGTTGATTTTGATAT
ACCACGATATAACTGATAAGGTGATTTAGTTAAATGCTTTTTAATGATTTTATTCAATTGCCGATGAAGA
GCTTCATTCTTTTTGGCTTCCATACATTGCCAAAGAACTGACTGTTCAAAGTCAGTAAATTTTTCACAAA
CCTTTTTATACATATCATATTGAAAATCAACGCTTTCAGCTTTTATAGATAACTGTTCAACATCTGCAAG
ATTAATAATCATGATAGCCTCCGTATACTTCAGAAGCTATCATATCATCGTTAGAAAGGAAAGTAAACAA
CTTTTTGAATTATTTTGCCCAGGGAGCCCAGGGCGGAGGGTCAAGATGGTATGAAGCTAGTTCTTCTAGA
AGAGCATCTGGGGCTTCAATTCCATAATTCTGTAATACTATACGGTACTCTTTCTTATAATCACTAGAAT
CATTCTGGATATTCGTAGAATGATTATCTTCTAACATCTCAAATAAATCCATATTAATTCCTAGCGATAA
AAACCAAAATGACGATTAGCTTCAGCAATCTTTCTTTCTTCTTCGGACATTCTCCAGCGTAGTCCAACAT
CAAAATGAGCCCAGACCATTTTAACAAATGCGTGTATGTCTTTAATATCTTCAATAATGAATGTTTTACT
TTTCGAAGGTTGACTCACTAATTTAACCTTATCATCTTCAAACAAGTCAAAAAGACCATATTCATGAGCT
CTTTTATAGCCTTTAATAGTTAAAGCTTCAGAAGAAGAAAACGGTGAATCAGTATTTTGCAAAATATCTT
CAGTATGCTTTATAATTAGAATAATATTTTCTGGATATTTTCTTTCTTTTATATCTTTAATTAAAAAATC
CGGATTTTCTGCTAAAGGAATAATTAATGAGCATTTTTTATCAAGTGTATTTACTGATTTACCTTCTTTA
GACATAAATTCTATTGAATAGTGTTTTGCTACTTCAATCATGTGATTTCCTTTTGCCTACTAATGGACCG
TCGGGAATTTTGTTTTCCTGGATATATTTCTCATTTTCTTCCATCATTTTACTGCCAATTTTAAGAAGCA
AATCCAGTGCTTCATTTGCTTTTGCTTTAGCCTCTTCTAACGTCATATCTTTGTTCACGATTTATCCCCA
TAGATGTCTCTCATCAATTTAAGCGCTGAGCGTTCTAATTTCTTTTCTTTCTCAGCACTAATCATTGATT
TCATCCATTCTTCCGATTCGTTCTGCATTTCTTTATTTGCTTGTTCAACCCAACCATCAATGTACATTGA
GTTTGGTCTATTGAACCATTCAAGTATTTTCTTCAGAACTTTCATTTGTTTTGCCTAAAACAATAGTAGG
ATTATCATCAAATTCATGAATTTTGAGTAAATTTGGATTTAAACTATTCCATACAGAAGAAATAAAGTAT
GATAAAGCATCTTCACTCACAATTATAAACTTATTTCCTTTATCTATTTTCCAACTATATACTGAATCAT
ATGAATAGAAAGATAAAGGTTTATCATTATATTTTTCTGCGCTAACATTAATGTATTCTGATTTAATAAA
TGCTTCAATTGCTCTAAATGGAATATTTTGTACAGTTTCAATAATACCAATCTTTTTAAGTTTTATTTCA
GCATCTTCTGGAACTGGCATTGAAACGAAATTTTTTACGAGATACATTGGGTCACAATAACCCTTATCAA
TCATTACAGCTACAGTAATTGGAACATCTTTAGCAAATGACATACTATTACTGCTAATATACATTTCAAA
CAAAATCGCTTCCATAATTTTCCTCAATCACAAGATGTAGATGAACAACTAGAATCACAAGAACTTCCAC
ATGAATCACCTGCCCATACATGAACAGGAACATTAGTATCATATGAATCAGAACTAGACTGTGTATTAGA
TGATGCAGTAGGTACTGACCAGCGCCAAGGATTTTTATAATATTCTTGGGCTTCTTCATAAGTCATAGTG
ACTGCTTCTACTGTTCCATCTCCCATATAAACATACTCAACTACAGTTAAAGGAAGGTAGTCATTTGAAA
TAGGAACTACACCTTCCCCAGGAGTCGTAGAGAAAAAATCCGTAAAGAAACTTTTAAACCAATTAAAGAT
AAACATTACAAAAAGCCTCTCTTGAATTCGACTTGCTTCTCGCCATAATCATATCGAATTTCTGCATTAA
ATTCGACAGAACCATCTGCGTACATCATAAATGAATGCACAACAACTTCTGTAGACCATGGTTGTAGTTC
ATATTTCTTCATTACATGCCGTGAAATGATAATATCTAAATCTTCATTTGGTTTAATCCAACGATTTAAC
ATAGTGCTCTCCTCTATAAGATAATTCTATTATACTATACTCATTTTGATATGTAAACTGCAAAAACGAA
AAAATGAACCCCGAAGGATTCCTTAAATTTTAACCACCAATACCTGGAGTTGGCGTAACAGTCCAAAGAC
CTTCATTTGCAGTAATCCAATCAGCACGCTGATTTTCTTCATATACTGTTGAATATGCTGCTTTTTCTGA
ATGAAATGTCTGATAATGAGCCCCAGAAATTTTGTGAACATCAGAATAAAGAGGGAAAGCTACAGAAATT
TCTTTACCCTGAATTGTACCACCGTCAACTGCTTGGTCAAATGTTTTAATATTAACATAACCGCGAGTAC
TAGCCATGTAATTCTCCTTTTATTTAAATTACATGACTATTTATAATAAATTCTCGCGGAACGTTAAAAT
ACCCAATTTTAGTTAATATAACAACATCACCATTAATAATTACCGGAGAATAATCTTCTGGAGCATTAAA
TTTCCAATGGGCTCTAATATTATATCCATCAGAACCAAATGCTCGACTAGCCGGTCTCCCGGCTTTTTGC
CATGCATAAAAATCAAATTTCATTTTGAATGCTCTATAATTAATTTTAAAGCTTCTTCACTGACAAAAAT
TTCGTCAGGACCTTCTATAATTTCAACCATACGAAGTTGATTAGTTAAGAGCTCACACACGAGCTCTTTG
TTATAATCTTTAAATAGCTGGTCAATACGTTTCTTATGGGCTTTCTTAAGCTGACGTTTATTTAAACGAG
CCATTAATAGCCTCGGTCTTGACGAGCGAAGTTTTCGGCATTTTTCAGATAATAAAGTTTAAAGATTTCT
TCAGCTGACATTCCAAGAGCAATGAATTTATTCATAAAAAAGTGAAACTGGTCAATCAGTTCAAATTTAA
TTTCAAGCTGATCTTCAGGAGATAAATCTTGAATTTTCTTGGATTGCATTTCAGAATAACGTTTCTTCCA
AGGTTTCCATACAGCAGAAGCTTCTTTTTCACCATTACTCATACCACCAAGAGAAGTATATAGCTCGCGA
GTTTCGTCTGCGATATAATCGTCTTGGTTTCGCAGCCAAGCAAGAACTTCTCCTGCAGTTTCAAGTGAAT
CAGGATGACGATTTGTTTCTGGTTTATCATTAGCCAAACGAATCTGTAAATGCCGCTGCATATCAAGCAT
AACCTGCAGTGGGTCAATATTGTGCATAATATTCTCAGCATATGCACGAGTTGCTTTATCAACACCTTCG
ATCAAATGAGCGCATTCATTAAAGTGAGCCATTATTTTTCCTTTCAATTCATTAATAAGTTAAATAATTA
TATCATTTGAATATGTAAGCAATTAATTAAAAATATATACTTCATCAGTTCCATTCTTTTCTTTGGAATG
ATATATGTTAAAGACGTATTTTTTATTAAGATGCTTAACATTATATTTTTTAGACCATTCTTTAAGAAGA
GTGTTTTCCTTTCCGTGATGCTCTAAAACATTCGACAGTCCAAATTTTATTCCTCTGTCATTTAAAGAAT
CTAAAAGATTTAAAAGGTCTTTTTCTTCTTCTTCTGACCAAAATTTATTATAATCAGCAACTGTTATAAG
ATACGGAGGGTCCACATATACAAAATCGCCGTCTAGAATTTTGACATCTTTAAAATGCAATGAACTAAAG
ATTATTTTATCACAATTTTGTTTAAAGTGATTAAAGCGTTTTTCACTATTTTTGTTTATAGTTCTTTTTC
CAAACGGAGTAGTAAAATTTCCTTTATCGTTTATACGAATCATATTACTAAACCCGTGAAAATGAAGAAC
ATAAAGTAAAAGAGGATCTCTAGTTTTATTATAATCTTCACGTAATTTCAAAAACTCTTCTTTTGATGTT
TTTGATAGTTTGTATTGCTTTATTACTTTTAAAACGTCATCCCATGATACATTAATAAGACGCTTATACA
TTTCAATAATTGGTTCTTGAATATCATTGGCCAATACAGGACCATTGACGTTCAAAGACACTGATAAACC
TCCACAAAATAAATCCACGAATCTGTCATATTTCGGAAAGTGAGGCTTAAGTTCAGGTAATAATGATTGT
TTATTACCCGTATACGCGATAGCTCCTAGCATTATATTCTCTCATTTATTGCAGCAAAAATGAATTATAC
AATTCTTCATCATATGTATTTGATAATAATACTAACACGTTTTGTGATTTAGCATATTCATTAAACCTTG
CTTGGATGGTTGGATTATCAGTAAATGATTCTCTTTTTGTCCATTTATTACGTGGATAATATCCGCATGG
CAAAAAATCTAATATCATCAATGACACAGGGTTTTCAGTTTTTGTGTATTCTTTTAATTTCTCTTTATCT
TCTAAATATATTCCAACCGAATCAATAGCTGTACCTCCACCAACTTGGTGTTTAATTTCAATTATATGCT
TTTTACCGTTGCGAGAAATAACAATATCAAATCTTCTAGTACGCTTTTTAGTTATAAAATTAGAGCAAAA
CAAATTATTTGATTTTTCAGTATCATCAATTAAAACCATTTTTTCTTGATAACTAACTGAACAATCAGTG
AAATATTCTTTTACTTTATTAAGTATGAAATTTTCAACTACGGCAGATATTTTATATGAATCTCCGTTTA
AAGCCATTTCATGCACAATTTTATTAATCATTATATCATCCTCAGCAATTTATTTTATAATACCACAACA
AGCTGAGAAAGTAAACAAATTTATGATAAATATTAATTTAAAGGAGGACATATGGTACAAAAATTAATGG
CACTTGTTAATGCCATCAAAGGTAATAAAAAGCGTATAGCTTTTACTATTTCTGCTATGGTAGGAATTTT
ACTCTGGAACTTTATTTTATCACCTGTTGCAATTGCACATGGTATTAATATTCCAATAGTTACTCTTGAT
ACATTCGTAGATTTAGCATTTGCTTTAGTTGGGTTAATTTAAATCTTAGCATATTTAGATAACCGCATTT
TAGCCATCAACCCCTGGGCAATATTATTTTTCATATATTCCATAATTTGTTCATGGGATGCACCTTCCTT
TCTAATCATATCATTAACATCTTTTGATTTCCAGGGAGATTTATCCCAAAACATAACCCTTTCTCCTGCA
TCAACTAATTTAGTCATTCGTTTGATAGTGTCAGGGTGACGAGGTTCATTATCTAAGACCCACACTCGTC
TATCTTTAAATGGAACAATTTCTAGGTCTAATTGACCACCCGTAATAGCTATACCATTTTCAATAAAAAG
TGAATCTATAGGTCCTTCTAGAACATATACATCACCATCTTTAACTCGTTCGACTCCATAGATTTTTGTT
GCCTCAGGATAAGCTTTGATGGTGATATATTTTTGAGGAGCATCTTTCTTTAATGCACGTCCTTGAAAAG
ACTCAGCTTTTCCACTAGCATTATAAATTGGAATAACAAGACGAGGCTCAGGTATTTCCTTTTTATATGT
TCCCGGTGCTATGCTATTAACCAATTTAGGCCATTCGGTTGTAAACCAAAGATATTTCCATTTATCCTTT
GGAATACAACGAGCTTTTACATATTTTATAATTGGATTGTCTTCCGCCAGTTTATCTAATCTAACGCATG
ACGGAAGAGATTTAATTATTTTCTTTTCAGGTTGTTTAGGAAGTTCTTTAGGTTTTTCTACTGGACGACT
TTTACCTTTTTCTTTTCTTATTTCAAAGATATACTCACGATATAAATCAGGTTCAAACTCCTTTAAATAT
ATTCCGATTGGTGCATGATAGTTACAGTTATAACAATGAATGTTTCCTTCATTATTATCACCATAATACC
ATCCACGGGCTTTATTTTGGTCGGTTTTTGAATCTCCACACACTGGGCATCTAAACCGCAATTTAAAAGT
TGAACTATTATTTACTTGTGTGAATTTAGGTAAATGAGCTAATGCACGATACGCAAACTCATTATCAATC
CAAGGTATTGATGACATTTTTACTCTTCTTTTTCTTTAGATTCCTCTTTTTTCTTTTTAGGAATCTGTTC
AGGACCTTTATTTACTACAGCGCCTGACGTTGTTCCAGTAGAGATATTTTCAGGATTACCACCTGAATCT
CCAGCGACCATATCTTCTTTGATAAATTCTTTATATGTTTTCATATTAACCTCTATTCATAAAAGCATTA
AAAATTTGGTCATCAATAGATGGTGCAGTAATATTTTCTGTATCATTTAGCAAATCATTAATTTCATCAG
ATAGCATAACACATGTACCTTTATTTCCTGTAATTGTTACTGCACAATTACGAACGTTTTCTTTATTAAA
TTTTAGGTTAATATTTTCGTAATGAAAATCCTTTAATGCTGAATATATTTTTAAAATAAAATTATCTTTT
ACTACAATAAACCCAACCTCACTATTAAAACGTGGTTCATGGAAACTGTAATAAACCTTTTCATCTATAA
AATCGTATGAAATTTTTTCCATTTTTAAATATGAAAATTCAGAACTATGCATACTAACCTCTAATTATTC
ACCTACCACTTCAGCGATGATTATTTTTATTATTAAAGTTTTTATCGCAATACAGAACATAATTATACTG
CATTACACCACCAGACTTAAGCTGTTTTTGCACTTCAGCTTTCATTTCAGGACGATCACGCTCAACGATA
TTCATAATATCTGCTTCAATTTGGGTTTCAACTTCAGTCTGATCCGCAGTCATAGACCATTCACACAAAT
CTTTATCATAGCCTGCCATAGCAGGCTGAGCAGCACAAGAAGCTAAAGCAAAAATTGTAGCAAAGATAAA
TTTTTTCATGATTAATCTCCTCAGTAGTTTATGTTTATATAGTATCTCAATTTCCAATAAAAGTAAACAG
TTATTTTAAAACTTTTGCGTAATCACATGTTACAAACTGTTTCTCTAGCTTAACGATCTTACGAAAGTAT
CTTTTGCATTGGCGAATCTGCCGCTTCGTAGGGCGAACAGCAAACTTAATAAATTCCACTCGACCAAATG
GAGGACTTTCTTCTGCTGGAATATCTAACACCAATTCCCACGTATCTGCAATAAGTGCTTTGAATTGCGT
ATTTTTCCTGACGTTATACGGAGTAGGTTTAAATAAAACAATATGCATATTATCCTCGGCAATCCACTTC
ACACACTTTCTTATCATCAATGAAAGCTTTAACTAATGCTTTATTAACTTCAGCATATTGAGTAGTAGCC
CATTGAACGTCATCTTTCATCATTGTGGTTTCTTTAGTAAACATGCTTTCATTCTTAAACCACCCCATAA
AAACTACCTTTACCAATTCCATAACAATCTCCTCATTTAACCAACAAGACTACTATACCATAATCTTGTC
AGCTTGTAAACTAAAATTTTAATTCATTCGCCAAAGCATCTAACTGAGCTCGAGTGGATTCATTTCTTTG
ATAGCGATTCTGCTCAGCCTGAATCTGTTGTGAACCTGCTACTTCGTTCACTTCAGTTGGAGTAGAATCT
TGTTCAATTTCTACCCATTTCTGATTTCCTTTTTGAACACCCATCAAAAACTTATTCCATTTGTTTTTAT
CACCATATCGTGATTTGATTTGCTTAATGAGTTGTTGTTCAGCAGCTGCTAGCTCCTCGGTTTCAATGAC
TGCAAGCATAAAATCGGCTGTTGCTGGAAGACCGGCAGATTCTGCAATATCGCTCATGTTAACATCGGAA
GAGTCCCAAGCTTGTTTACCAACCTGTGCTGCAGTCCAAAGAACAGTTTCGGTTTCAACAGCCAGAGCAC
GCAATTCCTCTGCAATAGCTTTAACAGTTGTGTAACTATTTTCTGAATAAACTCTAATGCGGCAAGATTT
ACAAATACCTAGATAGTCGACAATAATGATTGTTGGAACAAAATTCTTTTTGAGCTTCAATTCATTTAAA
AGCGATCGAAATGTATTAGCATCTGCTCCACCGGTAGGATACTGTTTAACGATTAAACGACCGAGAGTAG
ATTTCTCACGCCATTTTTCCATTTTTCCTTTATACTCAGCGTAAGAAATATGCCCATCATCAATGTCATC
AAGAGAAACATCAAGCATATTAGCATCAATACGTTTAGCACAGACTTCTTCTGCCATTTCCATTGAAATG
TAAAGAACATTATGTCCGAGCTGTAAATAATCTGCTGCCAATGAACACAATCCTAATGACTTACCGACGT
TAACGCCAGCCATTAAAACGTTCAGTGTTCCAGTCTCAGCTCCGCCTTTAGTAATTTTGTTTAGAATTCT
GAGTTTAAATGGAACCTTACGAGCTTTATTCATATAAGATAGCCAACGTGCTTCGTAGTCATCCATCCAA
TCATGACCAACGTAGCTATCAAATGAAATTGATAATGCTTGGCGCATGATGTCAGGAATAGCACCAACAT
CCGGCATTTTCTTATTTCGTTTTTCCGGAGGAAGCTCAGCATTAGTTTGAATTTCGATTATTTTAGACGT
AGCATTAAACATCGCCCTTTGCTGAACATATTTTTCTGTTTCTTTTACTAACCAGCTGTGGTCTTCCGGA
GAATCAGCTAGTTTTGAAATAAGTGTTTTTACACCAGAATATTCTGTTTCAGTAAATGAACTATTTTCTA
ATGCAACATTTAACGCATTAATAGATGGAACGCTATGGTACTCATTAACATGAGATTTAATTAATTTGAA
TGTATTTTTAGCTGGACCACTTTCAAAATATTCTGAATCCATATATGGCCAAACTTTTGAAAAATAAGCT
TGATCAAATATGAGATGAGAAAGAATAATTTCTACCACACTTACTCCTTAAAAGAATTTAAATTTTTTCT
TTGACCTTTTATTAAATGCATCTTGTAATTGCATTGTAATACATTTTTCTACATGAGGAGCTAACTCAGC
TTTTCTTTCTTGGTCAAGAACAGCAAAGTCCATTACAACCTTTCCATCAACCCAATCCAGTTTTGTTACA
TACACTATATGTGTAGAACCATCTTCTAGTTTAATGACAATCTCCTGGATAACATTTTCCATAGCGGATT
TAATTATCTTAAGAGACTCATTAAAAAGACGTTCTTTTCTTTCTTCTTCCCCCTCCGAAGAGGGGGATTC
ATCGATAATTTCTAGATCTAAATCTAAATCATCTTTATTCATTAAATTCTTCCATATCACTTAACTGTTC
GAGGTCAGTTTCTAAATCAGCTGCTGATTTACTTTTACTTTCTGGAGATTTAAATTTTTCAACCTTTGAG
TTAATCAATTCATCAACTTCAGCTTCAACAATTTCATTACTATCAATAGCACCTAACTGATAAGCACGTT
TAATAGCATCTCGGAATGGTTGATGCTTAAATAAAGGACCCCAGAATGTAGTGCAGTTAGTATCTTTTGC
ACGCCAAGATTTTTCTTCGCGAATCATCTCGCCGGTTTCTTCGTCAAGAAATTCACGAGCATACCAACCA
TTCTTAGGTTTTACCACGAATCCTAATTCTAGAGCCATATCTAACAATCCAGAATAAGGATCGATACCAC
CGTCAAATTTAACATCAATAAAAAATTTACTTTTTTCTTTAACGGTACGAGATTTTTCTACATTTAGAAC
AAATTGATACCCCTGAAGATCAGAACCATCTTTAATCTGACGTTTACCGATAATGAATACAGTATCAGCC
GAATACATTACGCCTGTACCACCTGTCATCACGGTTTTACTAAACATTTCAATTGTTTCAATTGTATGGT
TAACCGCAACACACGGAATATTTTTAATGCTAAAATAAGGAGTAACAATACGGAATAATGACTTCAGTGA
TTTAGCACGAGTCATATCTGCCACAGATTTTTCATTCAAGGCATCTTCCGTTTCTTTCTTAGAAGCCATA
TTACCGATTGAGTCGATGAATACAATAACCTTTTCACCACGCTCAATAGCTTCAAGCTGGTTCACCATAT
CAATTTTCAGCTGTTCAACTGACTGAATTGGCGTATGAATTACTCGTTCCGGGTCAACTCCCATGGATCG
CAAATAAGCTGGAGTAATACCAAATTCGCTATCATAGAATAGACAAACCGCGTCAGGATATTTGTTCAAA
TATGCCGCAACCATAGTCAAAGACATATTTGATTTAAAGTGTTTAGAAGGCCCTGCGAAAATAGTTAAAC
CAGACTGCATACCACCATCAATCGCACCAGAAATAGCAATATTAAGCATTGGGATTTTTGTACGGATTAC
ATCCTTTTCATTAAAGAATTTAGATGTAGTCAGCTCAGCAGTCATTTTAGAAGTGGAAGCTTTAATCAAA
CGGGATTTTAAATCTGCAATAGACATTCATTTTTTCCATAGGCATCATTATATTTTCCTCACTGGTTAAA
GATAGAGTAATTATAACACAATAAATTTAGGCATTAATCAACTGCTATTGGATGAATAGCATTAAACTTA
TGAAATGCTTCTGATTTTTCTTTACGCGAAACACACATGCGAAGAACCTTTAATGACTCGTCTTCTTCAC
CCAACGATTTTCGTTTTTCAATATTAGAAGTTTTCCAACGAGCTTGCTCTGGAAACTCTCTATTGATTTG
CTCAAGCGCTCTATTATGTTTAGAATTACTGCGAATTGAACTGCACCCGCCAGGAGCTTGTGCTTTTCCA
GATACAACTAGATATTTGAACAAGGCCAAATGCGGATAACCTTGATTAATTAAATTGAGAAATGCATACA
TATCTTCGCATAAATCAATTTTTCCATACCCAATTTGTTCTGTAGTAAGTTTTCCGAGGTCATACCATGT
ATTCGTGAATCCATATGAATTTTCACGATAATTACCCCAAGATGAAGTAATTTTAAAAATAGGTAGACGA
GCATGGCCATGATAATACCCACAATCCATGGCATCCTCAACATATTGAATCAATTCATAGAACTGTTCAC
GAGTCAATTGATTGACTTTATCTACGCAACGACGATCATCTCTTTTTCGCATTGAACTCATACGAATAGT
AGTATCATCGTCAATCATCCAGATTCGTTGACCTGCATACATATCAGTAATTGCTTTACGAGTACCGGCA
ATTCCGTTTACATCATCAGGAATAGTTATAATTTTAGCTCTAGACCCATAGGCGTCATAATAAGCTTTTT
CTTCATGTTCACGTACTACGATATGAGGTTCATAATCAGTCGGAAACATATCAAGGGCAGAAACTGCCCC
TACATGTTGATAGCTCGGAATTACGAATTGAATCATTTCCACTCACCGTTATAATCTTTTTTCACAATAT
GAGTTTCGCCAGTATTCCACCAATGATCAACCAAGTAAAAATGACGAGAATATACATGAAGACTTCCAAC
ATTCCATATAATAGAACCTGCTTTATACTGACGAGTTGAATCGCCTGCATTCAAATCAGATACTAATTTA
TCTAGTACGTATTTTTGCCATGCATAATCATTACGGAATCCGAAGACCACGTCATTTGAGCGCATGCTTA
CTACTGCATTGACTTTCTTATCACGAATCAGGTATTGTACTGTATTCGTGCACATGAAATCTGACATGCC
GTCTTTGTTGTAGTCAAACTGCATAGATGGACGAGTATAAATCATGATACCACGTCGAGAATCAGGATTT
TGACCAAGTTCAGCTAAACACATGTCATATTGAGCATAGTTATCTTCTGACCAGATAGCCCAACCATAAT
TCGAGTTAATTTCACCTTTAGAAGATGCTACTTGTTGCCAAATCTTCGGTGTTTCACCCGGAATATCTTT
AACGAACAAGCTCTTAGATTTATACCATTCAAGTTCACGCTGAATGTATTCATCATTAAGAGCGCCAAAA
ATAAACGGTTCATCTGCTACAAATGATGCGCCAATAATTTCAATAGTTTTAACACCAGTTTTATCAACTA
CGAAATCTTTTTCTTTTAATGCAAGCCCCAAATGAAGACGGATTTCTTCAACTGTCATAGAGTCACTAAT
CATTTAAACCTCAATTGATGCATTCATATTTAAATTGTAACAGTAATAAACCCCACCCTATGATAAGAGT
TGGAATCATAGCAGGAACTGTTACGCTATAGTATATACTTATTATAACCATCAAGATTAAAAGCAACACT
GCTATAATTTTGCTTTTCATTCTTTCTCTCTGATGATAATTACCTGATTTGGCTGCGCAGACTTTTTAGT
TTCACCAGCAATTGACCAAATAAATGTAATAAACCAACCAATAATTGACCAGTTAAACAGTAAAGATGTG
AAAAAGATTCCTACTGTCGATTTTGACCCACGCATCAAGGCGATAAACCATGGAAGCATGTATATAATAA
TAGCCAACACACCTGAAACTAAAACCATAAAAATTGAACCTGCTACTAAAGTTTCCATGTTTTCCTCACT
TAGTCAAATTTTTTACACATGAATTATAAGAATTCACTACATACTCCATCGGAGCATTTTTACCGGTACG
CCACTGGTAATTATTAGCCCAATTTGCCCAAAGCACGGCGCAGTAGTTTTCAATTTTTTCTTCGCGCGTA
ATTACATCCGAATTACGATATGCTTGAGCAGATTCATCTGGACGAATAGCCTCGTCAAAATTCGCCTGCA
TTTGTTCTACTGTCTGTTTTGGAGCTTCTTTATAACACTTGACATTAGGATTATAAAATTTGCTTGAACA
GTTTACAATTTTTCCTACATCAGACTGATTTACTACCTGTCCTTGAGCTACACAACCAGTAAGACCTAAT
GCAATAACCAAAATAGCGATTTTCATAATAATTTCCTCTTAAAACTTAACAAATAACTTTAAAGCATCTT
CAGTTTTAATTCCTTTTCTTACACCCATAACAGAAATTGGCTGTGACTGAAATTTTCCTTTACCATTATA
AATTTCTAATCCAGTCACCATTCCATTTTGTTCTATAATACCGTAAGTGTTACCTTCATTTTCAAATTCT
TTAACTTTAAAAAGTTTATTCGCTTTTTCTGCGTTAACAACTTTTAAATTTTGAATAAAATTAGTTTGAA
TATTTTTCATTTTGTGTTCCTCCGTAGTTGATAGTTGTATAGTACCACAGAGGAACAGTCTTGTAAACAG
TTTTGTGAAAAAATTTTTAATGAATTCAAAGGGTCCAGAATCATCTGTTTTTCATAAGTATAGATTTATA
TTACTTGTATGAAAAGGGGACCCGGAGGTCCCTAGATTTATTCTATCAGCCAAACAGGAAGTCTAACGAA
GCTTTTTCCTCATAGTCCATACCTGCCGATTCACACATACCCGCAAGCGGTTTAACAAACGATTTTTGGA
ACAAAGTTGAGTAGTCAATCCAAGATAGTACATCAGAACGAATTTCTTTTGGAAGTTCTGTACCCGATGG
CCAAGCAATGCACTTATCACCAAACGGATTTCCTTCACGTAATGGAAGAACCATTACTTTATTTCCATCC
AAAATTGGAGCTACACCCAGACCACTAACAGCTCGACGATAAGTTAGCACACCACGAATATGGAACGGAC
ATTTAAATCCTGGCCAACCTTTATCATCATATTTCGCTATATCGTTCGCAGTTTTTACTTCAGCAATAAC
TTTATAGTCAAGTTGACGATATTCTTTCTCGAAGTTCTTGTAATATTCTTGGACAGACTCTTCGCCTTCC
TGAAGAATACGACGAATACTTTCTTCGAGTGCTTCTTGCACTGCTTTTGGTGTTGAACTCTGCTGAGTTT
CCATACCCATGATTTTTAGATGCGGTTCAGCAAATCGCTTATCTTCCATATCATAAACGTTCAGAGCATA
ACGTTTTTTCGCTTTCCAAAATCCACCAACACCCTTTGAACCAAGCGGAGGGCAAGAAATAGCTTCACGG
TCCATATGCATCAGATGCTCGCGGTTATTCATATAATCACATAACTCACGATATGCAACATCAATCATAG
GTTCCATCTTTTTCTTACCAAACTGATTCATGAATTCAACCAAATCGTTCTGCTCTTTGAATCGGTCAAG
ACCAACTTTTTCAATAACTTTATCTACACAAACATATACCGAATCAGTATCACCTGCTGCGATGAAATCT
TCATCATTAGTTCCGCATACTTTATTCAGATATTCATTAATTTTACGAGCAATCCACTGAATACCAACTT
GACCAAAAATTGTGATAGCAGTAGCATTTCGTAAATCATAGTAACGGAAATGAATATTACCAAGAGCACC
ATAAAGACTGTTAATAAGAATTTTACGGTTCAGCTGATTTGTATTAGCAAGTGTAGCTGCTTTTTCACAT
TCTTCAATCAGACTATTAAGAACAGATTCAGTATAATTCGATAGTTCATTTAAGAAATCATCAGTGAACT
TAACATATCGTTCAACTTCTGGTTTAGTTGAACAAGACCCTGCGCCTTTCATAATAATCTTTTTAATAGC
TTCGGCATTCATTTCTTCAGCGAACATTTTCTTTTTCCAATCTTTACGCTGGAAAAATACTTTAGCGATT
TCCTTTGGAATGATACCTTCTTGATGCTTATCATACATCCATCCATTCGGAGAACAAGAATATTCATCAC
TTGGTTTAGGAGCTGTTCCTGCGATATATTCATGAATTGGATGAACTTTAAACTGACCACGAATAGTTTC
AGGACTAATGTTAACCTGGCGAATAATGCTCGGATACAGAGACGTCAAGTCAAAACTCATAATGTATCGA
CGAGCAATTGGTTTAGGTTCAAATACAAATGCACCCGGAAAACTCTGTTTAACGTGCGAACCTTGTTGAG
GAATAACCTTGTGTTCACCTTTCAATGAGTTAAAAATAATAGCATCCCAAGTTTTAATAGGACTCATTAC
ACCAGAAAAAGGCATTTTAGCATAATAAGACATACTTAAAACTAGATCGATAAACCCACGAATTTTATCA
ATTGCTTGAACTGATTCTACGTCAATGATGTTATAACTAATGTATCGTTGATGATTAGTCTCACGAAGTT
TATTAATAGGACCGTCGTATGGTAATTTACCTTTTTTGGTTTCATGTTGAGCAACTGATTCCAAAGAGAA
TGACGGCAAATTAGTAAAAGCGAATTTCTTGTACAAATCTAAATAATCAAGAATAGATACGCCATCAATA
GAATAAATTTCTTTGCTACCGTACATATTTTGAATTAGTTTAGATTTTACCCGACCGATTGGAGAGAAAC
GTTTCATACTGCGTTCACCCAGAATCATTTTAACGCGATTCATGATATACGGAACGTCAAACCCCTCAAT
ATTCCAACCAGTAAAAATAGCAGGTCGTTTCTGTTCCCAGAGATTAATATATTCCATGAGCATATCACGC
TCATTATCAAATGGCATATAAATTACTCGGTCAAGAATTTCTTGAGGAACTTCATCACCACCTTCACAGT
CAAGCTTAGCAGCTAACTTTGCATCCCATTTTGATACTGAACCGTACATTGAATTCAAAAGGTCGAAAAC
ATAAAAACGGTCGTCAATTGAATCATAATGAGTGATAGCATCAATTTCATATTCTGCTTTCATTGGGTCA
GGAAATTTATCACCAGTAACCTCAATGTCACAGTTAGCTACACGAACAAATTTTCGGTCATAAACAATTT
CTGAACCATACGTATCACTGATATAAGCGAGTTTAAAATCGTTCATACCGAGAGCTTCGAGACCGATGTC
TTCCATTCGCTTCATCCAATCTCGAGCATCTTTCATTGATGGAAATTTTTGAGGAGCACAGTTTTTACCA
TAGATGTCTTTGTATTTTGACTCTTCCTTACAATGCCTAAACATAGTCGGAAGATATTCTACTTCACGAG
TACGTTCCTTTCCGTTTTCATCAATATAACGTTCAATAATATTATTTCCGACTGTTTCGATAGAGATATA
AAATTCTTTCATAGATATTCCTTAGTTTATAGCCCGAGTTATTAGGCTCTTGATATATTATACTCCAAAT
AAGGGGCCGAAGCCCCTTGCTTAATTACCAATCGTATATTTAGGAACGAGTTTCCATTCATGTTTTTGTT
TAAAAGAAATAACTCGGAAGTTATTAGTTAAATCTTTCATAAAAGTTCTTTGACCAGGAACGATTTCAAT
TAGTCCCCAATCTTCTAATAGCCATGCAATCGAATCACGACGAACTTCATCTTCTTCTGTCATTTCAACT
TGGCGACCATCCATACGAAGCATTTCTTTAAAATGAACGATATAGTATAGTCCTTTTTTCTGAAGAATAT
GACAGGACTGATACAGAACTTTATCTTTATTATTAGCAATTCCCATACGAGTCAAAGTTTCTTTTACTTT
CAGAAAATCTTCAGGTTTTTTAAGAGTAATTTCAATCATTTTACCATTCCAATGCTAGTTTTTTGAGTTG
TTTCTGTTCTTTTACGTTCTTAGTCACTTCTTTCAAAAAATCATCCGTGACTAAACCTTTTAGTTCTTTT
AATACTAAAGGAAGTTTTCCGTTTTTAGTAAGAATTGATTTATAGTTAATTGCATCATTTGTATTAACTT
GATACCGTTTAGCAAGTAACTTAATAATCAATACTTCGGTGGAATCTTCAACCAGTTTTGCCCATTTACC
ATATCTTTTACCACGAGGAACTGCAGCCATCAGATAATTAAAATGGGCTTCATCACTTAAGCCTGATCCA
ATTAAATTCATAGCATATACAGCTGGCATGCACTCTGGAAATTGTGATAATGCATTTTCGACCATGAATT
TTGAATAATCTTTTTGAGCAATAGAGCATTTAGTTTTATTATTAATAGCTCCAATTATTTCAAAAAATTC
ATTTTCGGCTTTTTCTTTAAAAGAATCAGCAGCGGATTGGACAGCTGTCCAATCTTTTGAATACCAAGCA
ACTTGATGCTCGTTTAATTGAATATCATCTTCAAATAAGCTCATATCACTTCCACTGCATTTCGCATGCT
AATTGAATGAAAAGATAAGCTAAATGTAATTCAGTGTTAGCTGCAATACCATGATACTGATTATTTTCAC
CAACAATTTCGTACATACGAATAATGCTCTGTGGAGTTACACGTGAATAGATTTCTTCGGCAAGTTTACC
CACGAACCACGAATAATCAGCCGCGTATTTTGGTGCTAAAGCTCTGAGTTGTTTAACATCTTTATTTTTG
AGAGACTCAAGAACATCATCAATAGCACCACGATCGTTAGTAACCAGTGATAAAATACCAGCATCCAAAA
CACCTTTAGATGAATAACTATCGAGCTCGCCAATAGTTTTACGAAAATCAGGAAAATTCTTTTTAACCAA
AGCTGCTACAACTTTCATATCAGCTATAGCAATTCCTTCGTGCTTGCAGATTTCAGTCAATCGACGAATC
ATCTGCTTCATCATTTCAATTTTATCTTCATCAGTTGGTTGACCGAATGTAATAACTCGGCAGCGTGACT
GAAGCGGTTTAATAATACCATCAATATTGTTAGCAGTAATAATAATACTACAGTTTGAACTATAAGCTTC
CATAAAGGAACGAAGATGTCGCTGAGACTCTGCTAACCCTGAGCGGTCAAATTCATCAATAACGATTACT
TTTTGACGACCATCAAATGAAGCGGCGCTGGCAAAATTAGTCAAAGGACCACGAACGAAATCAATTTTAC
AATCTGATCCATTCACAAACATCATATCAGCATTTACATCATGACACAATGCTTTTGCTACAGTTGTTTT
ACCTGTTCCTGGAGAAGGAGAATGAAGAATAATATGTGGAATCTTACCTTTACTTGTAATAGATTTAAAG
GTTTCTTTATCAAAGGCGGGAAGAATACATTCATCGATAGTAGATGGACGATATTTCTGTTCAAGAATGT
GTTCTTTTTCATTTACGGTAATCATAATTTCCTCATTCAAATTTTAGTGTAAATTATAAAGGGCCGAAGC
CCTCTATTAAAAATCGTGGGTAGAATCAGCTTCAAGAGCTACTACATAATTCGCGTGTTCACCTTCAAAT
TTAGCAGCACCTTGTTTACCTTTTGCCCAGAGCAGAAGTTTATAATTTCCTGGTTGCATTTTCATATTTG
CCATATTGATAATGAAATTAAATGTATTTTCACCATCATAATCACCAAGAGTCAAAGAATATTTAACACG
GGTCAGAGCAGAATCTTCTACTTTATTAAAACCGTTAATTACGATTTTACCTTCTTTTACCGTGATAGCA
ATTGTATCAATTTGCAGACCACGAGATACACGCAACAGTTGTTGAAGGTCTTCAGCTTTAATTTCAGTAA
CAACAGATGCTACCGGGAATGGAATTGGTTTATTAGGAGCAACTACTGTACTCGGATCGGCTGCTGGCCA
AAAAATTGTTGAACGAGCATCAGCAATTTTAATATTTCCATCTTCTGACTGGGAAATTTCTGCATCATCA
TTAACTAGAGACAGAATACCGAGAAAACCGTTCAAATCGTAAATCGCTACATCAAAATCAATAACGTCAG
AAATATTTGCTTCCGCATAAGTTGTACCATTAACTGCGCGAGTCATAATAAATTGACCGGATTTAAGCAT
AATACCAGAGTTAATAGTAGCGAAATTTTTAAGCAGAGCAGTAGTATCTTTAGACAGTTTCATGTAATTT
CCTTCAATTCAAATGAGATTTAATTTTATAACTAATTTAATAAAGCAATTAACGATTAAAATCAGCCGCA
ATTGTTTCCGCAACAATTTGAGCAGCAACAATTAGACGTTCATCTGCATTACCGCAATAATCATCTTCAA
GGCGTTCACCACATGAAGTCATAATAAATTTAGCACCGGCGTTTAGGGATTCTGTAGTATGTTTGCGCAT
TAGTTCAATCCATTTATTACTTACTTCACGATCGATAGCTTCATAATACGCATGACGAGCAGGTGCAGAT
TTAATTTTGTTCTGAATAACTTCCATTGCGTTATCAGAAAGAGACAAAACCCATGCTCGACGAATTTTAT
TTTGGTTTTGTGGATTTGATTCAGAACGCACGTGTTTTGGCTGAATATCTTTTACATCAACAGTATAATT
CACAGTAATTTTAGTCATAATACACCTTTAGTCATAATAATCAGTAACAGTCCAAGCTTCATTTCTATTG
GACATTATTTTTGTATATTCTGCTTTAAATGCATTCCTAAGCATAGATTCAGTAACTATATGCTCTTCAT
TAGAAAAATTATTTCTCAGAATATATCGTTTTATTTCAGGAATAGTTAATAGATGCTGTCCAGTTGAATA
TTCCATGTTTTTCCTCCATAGAGATTATACTCTAATAAATTAAAGCATAATCTCTTATAAATTAAACCAT
TACAGTAAATCGACCAACTTTCTTCATTTGAAGATGCTGACCATATGCTTGCGGGTCATGGTCTCTATGC
GAAATAACAAAAACATTAGTATTTTTTAAACTATCCAAAATAGTTGAAATAGCTTTTACACCTTCAACGT
CGGTCGCTGAATCAAAAACTTCATCAAGAATTAGTGTGTTTATTTTAACACCTGAAACTTTTTCAGCAAT
ATCACGCCAAGTAAATAAAAGAGCAATATCAATTCGTGCTTTTTCACCTTGACTGAATGAAGCATAACTA
AAATCTTCGCGACCACGGGATTTAATTGTCTCATTAAATTCTTCATCTAATGTAAACACATAATCCGCTT
CCATTATTTTAAGATAATGGTTAATCTGCTTATTAAATAATGGAATGTACTTTTTAATAATAGCACCTTT
AATACCAGAATCTTTGAGCATATCAGTCAAAATTCCTCGGTGGTATTTTTCCATTACTAAATTAGTTTTT
GTCTTAACAATTTTATCAAGTTCTTCTTGAAGCAGTGCTATTTCATCAGCATGGTCAATAAACTCAGAAG
ATGCTTTTTCTATAGCCGCTTTAACTTTTTTAGCTTTATCTACTGCTGCGATCAAAGATTGCTTTTTATT
GCGAATATCATTTGCCAACGACTGCTGGGTTTTAATATTATCTCGGTATTCATCAACAAGAACTTTTAAA
TTATCACGATGTGTTGAAAGCTGTTCAAAAGAATGCGTACATTCAGAAACTTTATCTTTAATTTTAGAAA
CAACTTTATCACCGGAACTCAATTGTGACAAACAGGTTGGACATAATCCACCTTCGTGATACATATTAAT
GACTTTATTATACGAGTCAATTTTTGATTTAATTAAAACTGCTTCTTGACCGATTTTATTAAATGCATCA
GTCGGGTCTTCGTCTAAAACAATATTAACTAATCTTTCATTAGCTTCTTCTATTTCCGATTTTAGCGTTC
TAGCTTCTTTTGCCAAATCATCATACATATTTTGTAGACGAGTAAGGTTGTCACCAGTTAATTTTTTCTG
GCGTTCAACGTTATCATTATATATTTTAATTTGTTGGATAATACTATCTTTTTTAACATCAAGCACTTGG
TTTTGTGAATTTAATTCACGTATTAGTGCTTTATTAAGCTTATCCATTTCAGCTAATGTTCCTACCTCAA
GCAGGTCTTCCACAAGCTTTCTTCGTGCAGGGGTCGACAAACCCATGAAAGGGGTATACCCTGCTGTACC
AAGGACAACAATCTGCTTGAAACTGGCATATGACATTCCGATAAGCTGTTCAAATTCTGCTTGGAAATCT
TTACTGCTGGCAGATTCATTAAGACGTGTACCGTTAACGGTGATTTCGAAAACGTTTGGTTTTTGTCCTC
TTTTGATATAGTACTTTTTCTCATCATATTCCATCCACAGTTCAACTAAAAGTTCTTTCTTATTTGTGCT
GTTTATTAATTGACCTTTCTTTACATCACGGAATGGCTTGCCAAAAAGCCCAAATGTGATGGCTTCTAAC
ATAGTAGACTTACCACCGCCATTTCGTCCAGTAATAAGAGTTTTTTGAACCTTATCTAATTGAATGTCAA
CTCCATTTTGACCAACTGACATTATATTTTTATATTTTACTCTATTAAGTTTAAATGATTTCATTTTGTA
TCCAATTGTTCACAATGAAGAAAATTCTTTAACTAAAGCCTGTAATGAAGCCTCTATTGGATATCCATTC
TTAACTAACATTTTCCTAAACATCACATGTTTAGGACGATTATATGATATCCACAATTCATACAATTTAT
CTTTATTATCCCAATGATAGCCTTTTCGTCTAGATGCTATATGAGCTTTTCTAATCTCCGGATTTTTCCA
ACTAGCAGCTACTGAATTTGATATAGCTATTTTATATTCAGGTTGATAAAGCAGCACGAACAGCCTTTTG
GTGTTTAATTTTATTTTCTTCGTTATTAAACCATTCCATTGAAGCCATTGAAATTTTTTGTTTTGTTTTA
AAATTATTTAATCTTTCTTTGTTATCTTTCCTATTTTTTGCTACTGAAAAATATTTTAATGCCCTTTCTC
TAGCAGCATTTCTATTTTGTGGATTTGAATAATACTGTTGAAGCCTTTTTGATATTATGTCACTTACATC
CTGTCTTATAAAACTATATTCAGCAGCTATTAAATCAACTTCGGCTAAAGATAAATTTTTATATGTTTTT
CCTGACATCATTCTATTTAAAGCATTTAGCATTTTTCCATTTTTACCTTTTGCTAATAAGAAATGTGCTT
TGAAATGATTAAAATGACTTAAATTAACTAAATTCCATGTAGATTTTAAATATTCAGGAAATATTGATTT
AGGAAGCACGTGGTGTGCTTCCGTTTTACCTGGAGTTTTAACAGTTGAATTCATAGAAATAAAATTAATG
TAAGACTTGGCGTCTTCTTCACTCAACGCTAATTTTTCAACTAATTCCTTTATTAAAAATTCATCATTAA
TATCAAGTTTAAAATTCTTCACAAAAGATTCCTTTTAATGTATCTTTTAGACCATTCTATCATATCATCA
TAATCTAAAAAGTATTCATCAAATTCAGCCATGCAAACAACGCCTTGTGCTGTTTTTGATGTAATATAAA
TTATTCCAACATATCTAGAATCTTCTTCGGTATAATCAATGTTTGCTATGAATTCATCATTAATGTCAAA
TGTCGAAAACTTCACAGTATGCATCCTTAATACAAGATACAGCCATATCTCGCAATGATTTAGGTGTGTC
ATTATCTAAAATGTTGAAGTTAAAGGATACAGCCCAGTCAGTGCAGACCGTAACCTTTTTAATACAATTA
TCTTCAACCTCTAGCGGTTCAAACCAATATTCAATAATTTCTTTATGCCCAATATCATCTTTTACTTCAC
ATTCAAAGTGCTGACTCATCATAACATTTTTAAATTCATCAAAAGTCATTGTGTTGCCTCTACATATAGC
TGATTTGCATATTGAATAAGTGCTTCACGGTCAGAATCAGTGATGTCTGGAATTGCATTAATGTATTCTT
CCATCAATGTCTGAAGCGATTGAACTTCAACTTCTTCACTGTCATCTGACTCGACAGAGTTATCAATCTT
TGACACAACTCGTAATGAATGCACAACTTTCTCTAGTTCAGATTCGAACTTCGTCAGATTTTTGTCTACT
TCAGTTACTATAACACGTACTGATAGATTTGTAAAATCTTTATAGTCAATTTTTCCTTTAAATGGATAAT
GAATTCTACGATGCCAGGTAGTATTGTTTGGAATAAATTCCATTCGTTCTGTTTCTGTATCAAACATCCA
GAACCCACGAGGGTCATTCTCGTCACCTGCAGTTAGTGTCCATGGTGTCCCAATATATCTGACGTTTGCA
GCCTCAGAAATAGTATGGAAGTGACCAGACCACACTTCTTTATAAGTCTTAAGGAAATCAGGTTCAAGAC
CATGAGATTTCATTCCTTTATAAAAATAAAATCCATTCAGTTCCCAGTGACCGACGCAAAAAGAAGCAGA
TGAAGTTTTGATGTGTTCAAGAATTTCACCAGTATTTTCTTCGCACATCCAAGGAATCAAATCAATCAAA
CATCCGTCAAAATCTACTGTAGTAGGCTTATCATATACTTTAACATTAGGATATTTAGCCAAAAGCTCAG
TAGAGGCATTTGGATGCATTACATTTTTATAGTGGAGATCGTGATTTCCTACAATAGTATGTAATGTAAT
TCCAGCATCATCAAGCGTTTGAACTATTTCACGGGCGAACTCCATAGTTTTGTGTGTGATTGCTTTTCGC
ACATCAAAAATATCACCGTATTGAATCCATGTAGTAATTCCATTTTTCTTAGAATATTCTATTGCTTGTT
TAATTCCATCAATTTGAATACCGCGAATCCACTCATCATCAGCTTTAACGCCTAAATGCCAATCACCTAA
ATTTAAAATTTTCATATATCAAGAACCGTCATTGAAATGCAAAATAAAATTATTGAAATAAATCCATCTG
GAGTACTAAAGAACCCAATCCAACATGCTCTAGTGAATAGATAAAATGCAAGAAAAAGTATCACATATCC
AAGAAATATCATTATATCAAACTCCGTATAAAGCTAAAGGGCCGAAGCCCTTTATTTTGTAATAATGTCA
AACTGTTCTTTAAAGCAGAAGCTTGAATCTTGATGCTGATACAAAAATTCATATGCTTTTTCACGTTCGC
GGTCATAAAGAGTTCGGTCAGATGACAGTTCTTTAATACGCTCGAATGTTGATTCCATGTCATTTTCATC
AAACCAAATGATACCGCTATCATGCGAGGTCAAAGGAGTATTATCAACACGGAATTTTAAATTATCACCC
GTTGATTTCCAGAAAACAGGAATTGTTCCACATGCACCAAGCTCGAGATGAGTATATTCTAAAGAACGTT
GTAGATATTTTTTGTCCAACTTACTCAACTGATAACCAAATCCGGATTTACTCATGCGTTCAAGCATTTC
GCTATTTACATAACGGTCAAGAATTTGCGTTGGTAAATTAGGAGCAATTTTAATTTGGTCTACTTGATGA
AGACGATAATACTCGTATGGAATTCCTTTTTCTTTAATAGGAATGAACGCTGGAGAACGTTCCAGACCTT
CCATAATAGTACTTAGTCCTGCAGGTTTAAGATGTTTTTCGTGAAAATCAAACATCTGATAAAAACCTTT
CCATGTAGTCGTACGACCAATCCAACGGTTGATATTCATGTTAATTTCAGAAACATCTTTCCAGTAGGTT
GACCGAACCTTCGCAATATCCATAGGAGGCTGAAAGTTATATACTGTCGGCGCTTCTTCAATATCATCAA
ACAGAGAAACAGTTTCTGGATACCATTCTTTCATCAGAACTTTATTAAAATCACCATTATCAGAATGGCT
AAAAATAACATCAGCTCGACGAACAGTTTCTTCTAATCCCAAATTTCGACGCAAAGAAAGAGAAGAATGG
TCATGTTGATAAACTACAACACGAACCGAAGGTTTAATGTTATCAATAATTTTTTTATAGTTATTAATAG
TGTCTTCTTCAACTGAAGTAGCAGGAACTGAATTGATAATTAGAATATCACAATCATTTACCAGCTTAAG
TGTTTTATCGTATTCTTTTGCCAATAAAACCGGAATTGAAAATGATTTATAATCATGCGCACAGTTACGA
GTAAATGATTTATCTTTAGCATAAACCAAAGTTACTTCATGACCATTTTTAATAAACCAATCACGTTGCT
CAAGAGAAAATTTAGTTACACCGCAACCTTCAAGACCTCGAGCCATAAAAATACATACTTTCATTTAATA
TCCTCATTGTTTTGGTTTATTTTACCAAAAATTTATAAAGCAATATAGGAGCCGAAGCTCCTATCCGCAT
AATACGCCATACAAAGGCTCATTAGAGCTTCTAAATTTTATGCGCTTATATGTTATAGTTCCTTCTGCTT
TAGCTTTATCATGAGACTCTTTAAAGCGTCTCATCATTTCCTCTTTAGAGGAACGAATTTTATTATAATC
TATTTCAGAAGTCTGGATGTTCATCTTTCATAACTGCCACCATTTTTTAACTTGATAAGAATCAACCCAC
ACTTTCATATTAGGGTCTGCTCTTACAATAGGAGGATTAACTTCTTTAATTGAACTATCACGGTATTCTT
TTTCAGAAATTTTCACACAAAGATGACCATTCAAAGATTCAGTAAATCCTGCATTAATTTTAAGACGCTT
GAATTTTACGCGTGTAAGCATCAATCATATCCTCAATCTGCGATCTAGTAGTCTTCCAAAGAATACTAAT
GAGTTCATCTTTATATGGCTGTTTTAGAATATCCCGACTTTTCTTGATAGCATATTCGTATTGAGCAAAA
TTATTATTTTCAGCTGCAATCTGAGCGTGCTTATAAAGACGATTCAGTTCGCGTTTGTTTTTAGACAATA
ACTTATTTGCTTTTCTTTCTGCTTCAAGACGGTTCTTTTCTTCAATAGAAGAAATAAGCTTTTCCACTTC
ATCATTAATTTCGGGTTTATCAGTCATATTATTTCTCTAATATAAAATAAAAATCATCATCTGTTAAATG
ATACCGATAGTTTAATTCTACACCATTAGATTTAAAAGCGGTATCATACGGATTTTCTGGATCAATATCA
ATGTCAAGAGATAAAACTTCCCTGAGATACATTTTAAGTAAATAGGGAATAGCTTCAACTTCAGGTATTT
CTTCCAAGAATCCGGAGAGGTTAATCGTTAGCCTCATATAAAAAATCCAAACTAGGAGAATCGTCTACAA
CACTTTTCTTTTCAGCCCCCGGTGTTCTATAGGTTGATTCTTCGTAATGCGTCATTTTATCATAGATGTC
TTGAATAAAAGTTTCATCTACTAACGCAACCATATCGTCGTCACGACTGTCATAGACATTGTGAACGAAG
TAACTATATTTCTTTGCAACTTCCTTACGTTCTTTTTTAATACGTTGGACGAATGCATTAAAACAAGCTT
GAGTTATATACGCATGTGGGTTTTTATATTTCGTTTCATCAAAATTGTGAAGCCCCTTAATAGAAGCTTC
TATACCATCTGCAATCATTTCTTGTTTCCAAGACTGGGTGTATCCTGAAAAGTTGAAACGTTTAGATAAG
CCTTCTGCAATAAGCATAATGGCTAATCCGATAGTATCATTTTGACGAACTACTTTATTTGGGTCTTTAT
TATTTGCTAATTCTGTTTTCCAATCAATAATAGCTTGTAAAAGCTCTTTATTGTTTACGTAATTATATTT
AGGCTTAGTTTCTGACATTTTCACCTCTTAGCTCAATTCATAGATCTATTATATCATAATATTTGAAGAT
CTATCTTAAAGCATAGAGGATGAATCAATTTCAAGAATTCATCAGCTTAGCCGCTCCAAGAGCTGCATCT
AGTGAATCAAATTGGTCAACATATTCAATTAATTCACCGTAATTAGCGTATAACCACCATTGGCTAAATT
CATACTCAAGGATGAATCCGTTTCCTTCAATTTGAATTAAACCAATGCCATTTGTATTTACTTCATATCC
AGCAAGACGCAAATCGTTAATAAGAGCTTCGTTCATAATTATACCTTAGTAATTTTCAGGTCTGCAAATT
TTTTCTTGCGTTGATTTTTCATGCGACGAATAGTTTTATCGGAAATTTCATGCTTTTGATAAGCTTTAGA
TTCTACACCAAAAGCTTTAACATCAAATTCTGACAAGATATATTGAACCAACAATTCACGGACAGTATTG
CGTCCAATCTTCTGATCATTCTGTTTCATCGTCTGATGAAGCTCTTTTTCCCATTTATCCAAAATTTGAG
GAGTTACAATATCGCCTTTTTCTAACAAAGAAACTACTTTATCATATGCGTAAGAATTGATGGCGTTTTT
AATTTGAATAGTCATACATTATCCTCAATTACGTTAAAATTTTATTATCCAAAAAGGGCCGAAGCCCTTA
GCTAAACTTTTTGGCACCCTTCCAGCCTTCATACATCATTGCGGCTGATATTAATATTGCTCCTGAGCAA
CTTGAATATTTGTGATTCCAAAACCAGTTTAGAAAAACTTCGTCATCAATACCTTGGGCTATCATATTTT
CAAAGAACTGACGACGAGCTTCGGCAATTCGCTGCGATAATTTAGATTCAGGATTCATTTAAATTTCCCA
ATTTCCATTTTCATCAATAAATTTAATCCAGTCATTTACTGACCACTTGGTCGTATCACCCTTTGGAGTA
ACATTTAAAGTGTATAGCCCTTGCTTAAAAAGCATGCGTTTGATATTCATATTTTCCTCAGCTGTAACGA
TAACACTCGTTTGATTTACGTTTAGCAACTCGTTGAGAAGTATTATAATCAAAATCATCGTCAATGTAAA
CTGATTTTTTCAACTTTCTTACTTCACCGCGTAATTGACGATTTAGCTCATCTTTAACTTCTGAATCAAT
ACCTTTCATTCTACGCCATTTATCTGAGCGAAAAATGTTTTCAACCATATCTTTATGACTTACACCATCA
GGAGCTTTACGCTTTCCAAAATAGTCATAATCACGCACTTTTAAGTCTTTACGACGATACGTTTTACCCA
TGGAGTTTAATTTCCTTAGCAACTGAACTAAATACAGCACGATCACAAATCATACGTTTGTTCCATTTAA
TCACAGTATAATGAACATCTAAATCATCGACTGCTGTAACGATAACGATATGTCCGTTAACACGATAATA
CTGGTCAATTTTAATCTCTTTATCAACCATATCAATTCCTCAAAGGTAATTCATATGTTAATAATACCAT
AGTTTGAACTTGTTGTAAACAACTTTGTGAAAAATATTTTAGGGAATGATAAGAAAGGAACGATAGCTTA
GAATGGTAATATACAGAATGTGAGAAAGAAAGGCCCAGAGGGCCCGTCTTAATCTTCTATGATATCTCTA
TCATATCCAAGTGAAATGAGAGTTTCTTTGAAGTGTTTAATGTTCTTTTGTCTAGAATCATTAATGAAAA
TGACTGGATAACGAATGTTAAGAGATGTGAATCCAGCGCGTTTAGCAAGAGATACAATCAGTGGACGATC
ATACTCAATCTTACCATTATTTGTAAGAACTTTATAGAAAGTAAAAGGAGCATTGAGCTCCTTTAGAAGT
TTTGTAACTGATTGACATCCAGGACAACGACCTACTTCATCTGGAATTCCATAGACTTCAATCTTATTTT
GTTTCACAACTATTCCTTACTAAGAGCAGCATTCAGCTTGTTAGTAATTTTATCCAGGCGCTCATTGAAC
TCACTGGAAGATAAGCCCTTTTCTGGAGAAATTAAACTAATCACGAAAAATATAGCAATAAAAGGAATAA
GGAAAATAGCTCCAACTGCCATAAACAGAAAGAATGTTACAGTTGTAAGAAAATCAGCTAAACCTTTACG
AAATTTATACATATTTTACCCTTAATTAATTAACCAAGCATTGATAAGCACTAAACTATATTGGGAATAA
AATTCTGGACCAAAATGAAAAATCATATCATTTATAGTATCCATAATGTAATTCAATTTAATCATGTTTC
CACACCCCATCGGTATTTGACCAAAGTCGCTGATTATCTGATCCTCGCCACAGCTTTTTAGTCGGAAGAT
TTTTCTCATACTTCCCATCAATAATAACATCAACATATTTAAGCATTTCTAGTTGTTTAATATCTTCAAA
CTTATATCCTGTCCACAACCAAATGCTTTTATTGGGATAAAGATTTTTTACTGTTTGAACAATGCAATGA
ATGACATCTCGATTATCCGGATAGAGAGGGTCTCCTCCAGTTATAGTCAATCCTTCTATATAATCATTAT
TCAAACATTCAATTAATTGTTCTAGTGTTTCACCAGTGAATGGAATACCATTTCTAGCATTCCATGTTGA
TTTATTATAACACCCTTCACATTTATGCAAACAACCTGTAACGAAAAGAACGACCCTGCAACCAGGGCCA
TTCACAAAATCGCAAGGATAAAATCTATCATAATTCATTGATGCTTAACCCTATGCATGATTTCTTTATT
TTTGCCGAGATTAAATCCACGTTCGTTCGGATTTCCCAAATAACCACACGTTCTTCTTATTGTGTTCATC
TTTTTAGGATCAGTTTCTCCACAAATAGAACAAACAAATCCGTTTTCAGTAGGAGTCATTTCATGGGTAC
TTCCACATGTAAAACATTTATCTACCGGCATGTTAACACCAAAATAATCTAAATGTTGTGCAGCATAATC
CCATACGGCCTCAAGACCCTTTAAGTTATTTTTCATATCAGGAAGTTCAACATAAGAAATGTGACCACCT
GTCGCAATGAAATGATATGGCGCTTCACGAGAAATCTTTTCAAACGGAGTAATATTTTCTTCTACTGAAA
CATGGAAACTGTTAGTGTACCAGCCTTTATCGGTAACATCTTTTACGCTTCCATATTTTTCTGTATCGAG
TTTACAGAAGCGATAACAAAGGTTTTCAGCAGGAGTAGAATATAAACTAAAAGCAAATCCGGTTCTTTCA
GTCCACTGTTTAAGATGAGCATTCATTTTAGTTAAAATTTCTCGTCCAATATCACGACCGACAAGAATAT
TCAATTCGTGAATACCAATGTATCCTAAAGACACTGAACTTCTACCGTTTTTAAATAACTCAATTATGTC
GTCATCAGGTTTAAGACGAACCCCGAATGCACCTTCTTGGTAAAGAATAGGAGCAACAGTAGCTTTAACT
CCTTTTAAGGAACTAATTCTACACATCAAAGCTTCAAAACATAAATCCATTCGTTCATTGAACAATTCAA
CAAATTTCTGTTCATTGAACTGTGTTCCAATATAAGAATCTAACGCGATGCGAGGAAGATTCAGTGTTAC
AACACCAAGATTATTACGTCCATCAAGAATTTCATTGCCAGTCGAATCTTTCCATACGCCCAAGAAACTA
CGGCAACCCATTGGAGAAACAGGAACAGATGAACCAGTGATAGCTTTATTGTTCTTAGCTGAAATAATAT
CAGGATACATCCTTTTGCTTGCACACTCTAAAGCAAGCTGCTTAATATCATAGTTCGGATCGTCTTTATA
AAGATTAACACCTTCTTCAACGAACATAACAAGCTTAGGGAAAATAGGAGTTATCCCATCACGGCCAAGA
CCTTTAATGCGATTTTTCAGAATTGCTTTCTGAATCATTCGTTCAGTCCAGTCAGTTCCCGTACCAAATG
TAATTGTTACAAAAGGCGTTTGTCCGTTTGAACTAAAGAGAGTATTTACTTCATATTCATAAGCTTGGAA
TGCATCGTATACGTCTTTTTCTGTTTTAGATTGAGCATAATTCAACGCATCAGCGATTTGCCATTTTTCT
GCATCCTCAATATGTTTTGCATATGTGCGTTTAACATAAGGAGAAAGTACTTTATCTACATTGGCAAAAG
TCGTTCCGCCGTATTGGTGAGAAGCAACCTGTGCAGTAATTTGTGCCATAATTGCAGTAGCAACGCCAAT
TGATTTAGGAGTTTCAATCTGTGCATTACCAAGCTTAAATCCGTTTTCAAGCATTCCTTTTAAATCTACT
AAACAGCAATTAGTAAATGGAAGAGCAGGGGAATAATCAATATCATGGAAATGAATAATTCCGCTTTCAT
GCGCTTTCATAATAAAAGACGGGACCATATTTTTGGCAATGTGTTTAGACACAATACCAGCCATAAGGTC
CCGTTGAGTTGGAAAAACACGAGAATCTTTATTAGCATTCTCGTTTAAAAGGTCTTTATTAGTTTTATGA
ATCAATCCTTCAATTTCTTTTTCAATTGTCATTTTAAACTCTTTCTAAGCTGCTTCTTGAATGAAGCTAT
TAACTGTGTTTTGGTGTCAGATTCATTATATTCAAATCCTCTTTGAAGCATCTCGGCCATCATTTCCTCT
TTTCCTAAACGAGAAAATTCCTTTGATTTATCTCCAACAAAGTTAGGGTGAATATTATTTTGGGTGTAAT
CGGATTTTAAGTAAGTAAGTAAATTTTCTAACCATTCAAGATAATCAACCCCTTGTCCCTTTAAGCCAGA
ACGATTAAATTTGTGCTTCATTTGACCTTCTGCGGCATTGCAGAGATTACAAAGCAATCCACGCACCTTT
CCTGCTTTTGGTCCATTTAATTCATGGTCATGGTCGAGGTGATTAGCTTGAACATCAGGATTTAGTTCTC
GTTGGCAAATTAAGCATTTACCGTTTTGTGCATTATAAAATTTTTGTTTTTCTTCTTTGTATAATTTGCC
AGTCAATAACATAATAAACCCTTACCTTAAATAGATAAGGGTATTTATTATTTTCAAGTATTGTAAAACA
TTTGATGCAATCGCTTATATTGCTGAATCATTCGGTCAGAAAAAGAAATTTGAGTTTCAAGCCATTCAAT
GTACTCTGCGGCAGCTTGCATTAAATTTCCTTCATAGCCATCGTTATTTTCTTGTGCAGCTAATTTAGCT
AATGCGTATGAAATACGTTCACCTTGAAAATCGGCTTTAGGCTTCTGAACAACTTGATTAGTTCGCTCTA
CAACTTCTTCAATTTCGCCATTTTCGACTGATTCAGTATTCCACAAACACCAGTATGTAATTGGCTTATC
GTAGATGTTAATAATCTTTCCATCAGAAAGTTCAATTTCAATAATTCCAGTATCAGGTTCTATATCATCT
TCACATTCTTTTGCAAGTTCACGAACTTTAAAGACAGTACCTGCACTAAGTTCCGGCCAGTAATTACATA
GCCCTGTATCAGCACGATTAATTCTAAACCACTTATCTACTGTAATCATGTCCCATCTCCATATCAATTA
AGTCATTTATCGTTGGTTCATTATATACTGTTTCTTCATCAGTGTAAACCGGTTCTTCCGGCTCTGGCTC
TACAGTTTCCCATCTAGCCGCCCACCAAGGTTTTATAGCGTAATCCATTCTCGTACTGTCTGAGTTACTA
CACGTTCTCGAAGCTCAACCAGTTCAACGGTAGGAACTGCATAATACCAGTCAGAATGGTAAGAACCTGA
GCGAGATTCATTTACAGCCATGTACATTATGTTTTGGACTAAAATAAACACACTGACGATATTGGCATTT
ACCATCTTGCACCCAGTCTTCTATTTCGATAGGTTTAAGATAGTCGGAAAAATCGAAATCATAGTTTTCC
GAAAATGCATCATGGTCTTCGATGATTTCGCTCAGAACTGCATCAACATCTAATTTATTTTCAATAGTCA
TTTTTTCACCAATTAATTTCGCAATTTATTAAGTTCTTCATAATCAATCCAGGATTCTAATCCTGATGGC
AAATCAGATTCAATTTCCCAAAGAAGTTCTTCAATTTTATGAAGACGATCTAATTCTTCAGCTGGAATAG
TAACCATTGATGGAGTTCTTGATACACTAATATCGTAAATCATATTTACCCCAGTTTGACCATACAATCG
CCGTATTTCCACTTAGAAATAGACTTTTCACCGTTAGAATAATAAACTTCGAGTTTAGCACGATTATTTT
TAATTTGAATAACCTTGGCTGTCATCAAAGTTCCATACCCATAGTAAACTGCAACTTCATCACCTACATA
TACCGCGCTTCCGCGGTAATCATGGATATAATCAGTTCCTTCGAGAATCATTTAAAGTATTCCCGCAATT
GGTCAAATCCACCAATATGACTTCCATCAGGAGCAAATACCTGAGGCATTGTTAAGCCGATTTGAGTATC
ACGACCTAGTTTAGTCAGAAGCTCAGCAATTTTCTCATCGTCAAAAACACCTTTTTCCGGCATAATGTTG
ATAAATTCAAACGGCTGTTTCTTCACAGCCAAAAGACGTTTTGCATTATCGCAATACACACATTTATGGA
TGTTGCTATCATAACCATATACTTTAAACATATTATTCCTTAATTCCTAGTACTTGTTTAAAAGTCTCAT
CGTAATCAAGACTTTGGCCCGTTTGTTCTTTATGTTTGTATATAATATCACTTACTTCTGATAGCATATT
TTTATATGAACGAGTTAAAGCTGATTTAAGCACGCTGTATCTATCAGGAAATTTACCATGTTCATTATAA
TAAGCTATTGCTAATTCACGGACTGCCTTTTCAGCAGTCTCCATATATTCTTTACGCTTTGTCATTTTCT
TCTCGGTCAAATCGGTGTTTACAATGGCGACATTTATAACGAAGATTACTAGTCTGCCAATGGACCAATT
GCACCTGTTCAGTTCCACATTCAGGGCAATTAGGAACGTTTTTAGAAGCCCTTTCGCGGCGTTCAACCAT
GACCATTACAGAATCCCAATTAACAGGAGGGCTAATCATCGCAACCATGAATCTTTCCACGCACTTTCAG
ATCGTCTTCTTCACCAGCCATAATAATTTTAATTACTGGAATTACTAGAAGCTGCAATATCTTCTAATAG
ACGCTTTCATTTCAACACCTCAATAGCATTACGTAAACCATTTGCTTTGGCGGTTAAAGCCTTAAGAACT
TTAGTATGCTCTTCAATTTGTTTTTCAACTTCAATCAAACGAGCATTGAGATATTCACGTTCTTCTTTCA
TAGTATCATTCCCATGATTGGGTTTTGGTGCAGATTTAAATTCACTAGGGTCCTTTAACTTAATAACAAA
TTTAGTTTCAAACAGTGAAAGACCATAATTCGTATTATCATCAAAGGATTTGACTACATCCATATCAGAT
AATAACACGCGCAAATTATAAGCCAAAGAACTAATAGTTTCATTATGTTTATTAGCTTCGCGTGGTTTCA
TATACGGAAGATTTTTATATATCTCGTGCGGAGCACAAACAATAATTGACAATTCAAATTGTCCATTCTG
GGACGATGGAGTGAATTTAGCCGTAACCCAGTCTTTTACATTCACATTAATAGTACGGTTATCACCATGA
CAAAACAGTCTACGAGAATGCTTAAAAAGCATATTCACGTTATTATTGAATTCGTGTGAAAATTCACTAG
CAAATTTTTCTTTACTATCTTTAGAAAACCATTCTTCTAAATAAGTTCTTTTCACGTCGTTAATAATATT
AAATGTAACAACACTAGCATTTGATACATTAGTCTCAATGTAGCTTGGATACATAAATTTTTTAACATTA
TTAACAGCTATCACAGAAGATAGTAATCGGGAACGTTTGAACCACTCGAGCAAAGAACCAAGAGAATGTG
AATACGCATTTTGTGTATCTTTACAAATATGGTTTTCCCATCCAATATAATCTAAAAAATCACGAAGAAT
ATTATTGATTACTGCTCTGTGTCCAATCTGATAATTACGGTGTTTAGTAATAAGACTGCCAAAATAATCA
ATATAATGTTTACGAGTTTTCATGTTCTTCTCACTTGGTTAATGATTTATACTCCGAGCCATCCTTGGCT
TTAAATTTTACTTAATTAACTGTAAAGCTTGTTCAAGACGATCCAGGCGATTAACAGATTCTTCCCAAAT
CCTTTTAGCCTGCTCATATTCTTTCTGCGCTTTATTAGAAATTTCTAGAACTTCTTTATAAGCTTTTTCT
AGTGCAATAACTTCTGGACGAATTTCTACCGGTTCAGGTGAATCGTCAAGACATTCCATTAGTTCCTCAA
GGGTAGTTTCTTCTTTAGGAGTATTCACAATTTCATCACATTTTTGTTGGTAAATTTCTTTATCAGTCGG
TGAGTACGCACACTTTACTTCACGAAGACTAACTACAATTTTATATCCTTCCCAACCGCATATATTCTTA
AAAGGATATGTATGAATATTTTCTACTGTTTCCATACAAAGTAATGCGGTCTCTAATTGACGAGTTATAG
TGCTAGCAATTGAGAAAAATTTATTAATATTCTTTTGGTTAGTTTCTGGTGTAAAAAATTCATAATTCAC
AAAAAGCTGCTTTATTTTTATCAAGTTCATATTCTTTTATGATAATCATATCAGAAGCCAAAGGATGAAT
TTGACGATAATCACCATAACATAATTTAGAAGCTGATTTTAGAATTTGCTTCTTAAAAAGTCTGAAATTA
CTAATCCAACGACGAGTAAAAATATTCTCAGGGTCTTCTTTGACATTAAGATGATAAGAATTAACATCAC
CGAACCAATTATATCCTACTACATCTTTGGTTCGTTTAATTTCTTTCCCAAAATTACCAAGAATATCCCG
ATTAACCAAATATGAAAGAAGACGAGACTCTTTAAAGGTTTTCTTGATAACATCTTTATCTACACGGCTA
GAAATTTTACGAATTTCATGAATAAATTTAGCAGAAGAAACAATACCTGCATCAACACTATTGAGCCATT
GATTGATAATAGAAAGAACACTATTTTGGCCAAACATCGGTATAGCTTTATCATCAATACACTATTGAAT
GATTTGATATATTCGTTACGAGTCATAATAATCTCCTCAGTAGAAAGTAAGAACATTATACCACATCCTT
GTGGCAAAGTAAACTAGTTCAGTGCATTTAGTGCATTGTTCAGTTTAGAACGTTGCTTCGTGAGATTTTT
GACTTTTTCTTGTGCTTTTTCTAGCATCTTTTCAGCTTCTAACACTTCATTAGTTGCTTTAACGAGTTCA
TCATCTACTGCCTTGATAGACTTCTCAATCGCATCCGCGTGCCATTTTTCAACAGGTTTAAGACTCGGAT
TTTCAATAGGAAGAAAATTCACTTTATTGAATTTCCATGCATCTTTATTACCTGAACTATACATCCAAAA
TTTAGGATCGTTTGATAAGTAATTAGATAAATTTAAGTTATCTTGCACTTCCTGCTTTTTCTCTTGTACA
ACTTCGTCCTTTCTCAAAAAATCGTATTTAAATAAAACGACCATATCAAGTTCATACGTTGTTGTGCCTA
ATTTAAATCGTTCGAAATGCTGTGAAATCTTAGACTGAACACTAGCAACAACATCCATATACTTAAATGC
TTCTATCAACTGTGATTTAAGGCATTCACAAATTGAAAGAGAATTTTTTGTATTAGGTTTAAAGCTAATT
CGTGCAGTTCTATTATTTTCTTTTAATGGTCTTACTTCCATCTGAAGAGTATAACCATCAAATTTCAGAT
TCTTTAAGTTAATATCAGAACCTTTTAATCGACTAGCAGTCGACAAAATTTGCTTTAATTGTTTACGGAA
TAGAGCAATAAATCTCCATTCAAGACGATAATGATTTGGATTAAAAAATCCTGTTGATAAATCAACCTTA
CTCTGACCAACGCCTTGAACAAATAGAGGATTTTTATAATCAATAGTTTTACAGAAATCAACGAGCTGCT
CACGAGCAGTCATTTGTGTAATATACCCTGCTTCATTAAAATTACGCACCCATTCACTGCTGTTCAGATG
TTTAAAGGCGTGAATGGAACAATTAACTTTATTAAGGTCTAAATTATTTTCACACAAAAATGTCATAGCA
TCACGAGTATAGCTGGCATTACGAACCATATCTTCAATTTGAGAACGAGTTTTCATGGTGTTCCTTAAGA
TTTAAGTAAATCAACAATTTTAATTAATTTTTCACGTTCAGATTTAGCTTTACTACTCAATCCAGATAGT
CTAAAGATTTCATCGTCATATTGTTGAATAGAAATATTCAGCTCTTCAATCTGTTTATTAAAATAATCAA
TTTGTTCAGAATGTTTTTCGTTACTACGAACTGGTACAGGTTTTGTAGGCAATTTAGTTGAACTGGATTC
ATTCGGGCGATAAATTAAAATGCAATTTGAACCAATCGGGCATTTAGCACCAGATGAATATTCTAACGTT
CAAGCTTCTTTTAAAACTTCAAAAGCTAAACAGAGATGATGCCCCATATTGACATAATCTGTAGAGCGAG
CTCTGACGTAATAATCATCTCCACGAGTACTAAATTTAAAGCATTTAAGGTCTTCTGTATTATTAGTTTT
AAAAATCATTTGTTTATCTAGACCTTTAGCTAATCGAGCGCCTAATGCTAATAATCGTCGTTGATTTTCC
CACAAATCCGCAATCATTTGATCGAATGATAATTTCGGCATTAGTCGGCCATAAAGGTCATATCCTTTAT
TATAATTACGAAGGATTTCACTCGCGTTAATACGAGACAATGCTCCAATTTTATTAAGGGCTTTCATGAT
GCGATTAGATAAACTCATTCCAGACCCGTTTGTTCGCTGTAAATGTTTTTCTAATCCAAATCCAATATCA
ACTTTAAATTTATCTAAAATTTCAGCATGAACATCTCTGTCAATAACATTCAAATCCAAAGTTGGGTTAA
ATCTATGAAAAAATTTATCTGGCTCTCCACGACGAAGTACAGTCCATTCATTCATCATTTTTTATTAACT
AAAGATTTAATTACTGCATTGACATTATTAATTACTACTGACATATTTTCCTCACTCAATTTTACTAATT
ACGCGGAATAAGATTGAACAGACTATATAAGTACCACATATAGATTGAACTAATACCATTCCAAAGAACC
AAACAATATTATCAAACAATGTCTGTTTTACGTCGAAAGGACGTAAACTTACAGTAATTATCGCCTTTTT
CTATTGATGAATACATCTCTGGCGAAATATATTCGCTAAATCTATAACCGTCTTTGAGTTCATATACGGC
AATAAACGATAAACTAGACCCCTTTCCTTGAGTTCCTGTAAGGGTATTAACTACAGTAACATCATAATCT
TTATAATGCATATAATCATTAATTGCGTAATAACCATATGCAATTACTATACATAAACAACATATCAATA
AATTCAATCTTTTAATTATCAACTGTTTCATAATAATCTCAATTAAAAGGGCTTAGAACCATTATACCAT
CCTTGGTATAAAGCGGTTATGCGAGTACCGTCTTTAACCGTTCTTCAAACTTCCGAAGAGTATTTTGGCG
TTCAGCTCTTTGCTTTTTGTAAGTTTCAATACGCTCTGAAATGAGAGTGTATCGTTCATTTACTGATTCT
TTCATAAAATCAGGAATTTCACGAGAAGCTTTAATCTCGTCAAATTTATCAATAACAGCTTGCTCTTCAG
CAATTAAGTTATCATACATCAAAATATCTTTCTTGATGAACTCAATATCTTCTTGAGTTACACGAGATAA
CTTAGATGCTTTATCCTTTTTGTACTGTTCGTTAGTATCACGAGACCAGTGTAATGTACGATTTTTATTC
GTATTTTTGTAAATTTCTACAATACCAATCTCATCGATAATAACGATCCAATTCCAACGGGATTTGTAAA
TTTGTCCTCCATCAACTGTGATTTCACCTCCGATTGAGATGTCATTAAAGAACTTGCTTTGTGCTTCAGA
TTTAAATTTACCATCGTTGTAATTTACCAGGTTGAAAATATCTTTAGCGTTCATTTTCTGTTCATCCGTA
GTTGATAGTTGTATAGTACCACAGAGGAACGGTCTTGTAAACAACTAAAAGAAACTTCTTTCACAATTTT
TTCCACTGAACCACGCGCTCACTGCTTTCTTAGTCTCAGGAGCAGTGTTATCCATAAACCATTCAAAGGC
AGCCTTTTTATGATTCTGGAGGGCTTCTCGGGCTTTAATCTGCTCACGGTCTATTAACACTAACATATGA
GCCTTTCTTGTCACCAGGGGCTTCTTATGATTTTTTGAATATTCCCAATCATTTGTCCATCGCATCGTTG
TTGCGAATTGAAATACAGCTTCTTTAATCTTAGTTTCGTAAATTTCACGAGCCTTTGAGTATAACATCAT
TACCTCCATTTACCAGTTTAATTCTAGTCATCTTTTTGATGGCAGTCCATATAATCTATTTCTGAACTGC
CTTTTTGTCATAGAAGGCCTCTTATGAATTATTTCAGAAGAGTAACCTCAGCGATTTCTTCCCAACCGTT
TTTGTCGGTCATAATAAAGTCAGCAAGATAAAGAGCAGTACGCAGTGAAACATTGCGTAAACGGTTAACA
TTGACTTTCATCCATGATAATGCTTTATAAGTTTCTTCATCAGAAAGACCGCGCTTTTGCATCATGTCAG
TTGAAAGAATAACATCTTCAACCCTGACCATAATTTCTTCATTAGTGTGAACACCCAAATCCAAATAAAC
TGAGCGGGACACTAATGCTTGTAAATGTGGAGCAAGTTTAGTACCACGGTCTAATTCGCGGTCAATGTCA
ACGTTTGTGATAAAAACAATCGTTCCTTTAAATTCAAACTCACGCTCAATGCCTTTTTCTTCTAAGTAAG
AAGATGCAGTGCTCCAGCAGACTTTACGGGTCTCTCCAGTGTCCAGAGCAGCTTTCAGAAGATTAAGAAT
ATCCATATCAGAGAAAACATCCACATCATCAATCAAAAGGACAGAATTCTCTTCACGATTATTCCAGAGC
TGTTCATAAAGACCGATACCAGAGATTTTACCGTTAATGCTTTTATATTCAATGTATCCAATATCATTTG
CTTTATTTAAAGCTTTATCTAAAGAATACGTTTTACCAATACCTGCTGCTCCCGAGATAATTAATGAACG
AATGTTTCCGTTAATAATACCATTCGTCATCATTCCCATAACATTAAATCTTTTATTAATGCGGGTTTTC
ATATCTTCATATGATTCTTTAACTTCTTCAACTTTTACACCATCATATGAAATGTCTGATTTGTAAACCC
AAACACCGCGACGTTTACCGTCAATTTCAACAAAAACTTTACCATCTCCTTGTGCATCTACCGGAGCATT
ATCTGGGAACCATTCACCTAAGAGCTCAAAAGTTCCAGAGATTTCTTTACCGAAGTAGATACCCTTATTG
ATAGTTACAGTTTTCATTTTATTCTCCAAATCCGTATCAGTTGATAGTTGTATAGTACCATAAAGCTTTA
TGCTTGTAAACCATTTTGTGAAAAATTTTTGAAATAAAAAAGGGGACCTCTAGGGCCCCCTTTATGCTTT
TATTCCATTTCTATTATATGCATGCTCTTTTTGCTATCAAAATATATGTTTTTAACTGTTAACTCCGAAT
TAATTGGCAATAAAAACTCTCTTTCATAATCCACCATACAAAGATTATCATAAAGCTTATTAAGCTTATT
ATCATCAGTCTGGCTAGATTCTTCAATTGCGATTAAATTTTCTAAAATTTCAATCATAGCAGTTGAATAG
TCAAAAACGTTTGCATTTTTTAACACTATTAAAACATTAGTCATATAGCGTTCTGCTGCAAATGTTTCAG
CTATATGAGATTCACTACTAAAGGAAGTTATTCTTTTAAATTTGATTCTCCTATTAACTTCAAACTTATA
AGATAGTACTTCCTCTATTGTAAGTCCTCTAAAAAGTACGTCTTTAATCTCAAGTTTGTCTTTAATGTAA
TCATTAACACGCTTATGATTAAAATCATTAATTTTGTTGCCAAGGCATTTCATTAAAATATGCATTGTGT
TTCTCTTCAATTTTTAAAGAACAATTAATTAACTACAAATATATTATAATATGCTTTATGATAGAAGTAA
ACAACTTTGTGAAAAAATTTTTGAAATAAAAGGGGAGCCCGAAGGCTCCCTATCATTTATAATAACTTCG
GTGGTTTTCAAGATAAACCTTCTCAAGGAAGTCATCCCAGAAACCCATGTCTACTTTTTGCTGCATACCG
TTCTTAGAAGCTTCAGTAGATGCTGCTTCTACTTGATCGACCACATCTTCCAAAAACTCTTGAACCGTTT
TAAATGGATGTTTACCCAACTTCACGTCGAGAATAAATGGAGCGTCTTGAAGTGGATAAACCAAGTCACC
AGTTTTGTAAATTTCCAATAGTTGAAGTCCACCACGACAAGCATGGCTCAGAGCTTTCCAGTCAATGCCT
TCGTTGGCTTCGGCCTTACGGGCACGTTCACCATATTCAGCATCTAATTTGTTCAGTGACTGCTTAAGCT
CAATAAGAGAAAGCGTTGTCTGATATTTACGACCCAATACAGTGTAGAACGTTTGTGGGCCTGTTTTCTC
ATGATTATGGAACACCCATTCACAGAATTCGTTTTCTGGAAGACGATGCTTAATATCTTCAACTTTAGTA
CGACGCTGCTTAATAGAACCATCTTCTTGGTAATCAACCCATTGCTCGGGGATTTGATTAACTACTTTCA
ATACATCACGTAATGCAGCCAAACGAGAACCCTTGACACCGTATTTAGAAGCTTGCTTACGGACATATCC
TAAATATGATTTCATGTTAGTCGTATAAAAACGAGAACGGTTGTCTTGAATAAACTTCCACACATCAGGC
AAATCAGATTTAACCACTAGTTCAGGTTGAGTGTGAAGCATATCTAACGCTACAGTTTCACCATCTGCTG
CTAATTTAAAGAAATATTTAAGACTGTATAGTTCATGGTCAATATCATCTTTAGTGTTTTTAGATGATGT
GTTGTTAGTGTTTTTGCTCATGTGCTCTTTGACATTTCCGATAAGAATATCGCGAGCAGGAGGAACAAAA
ATTTCTTTAAAATCTACATCAGATTCTGGGGTAGAAGTTCCATAAAGATGACTACCAAAATAGCTTTTCA
TTACTGTTTTCATCATTCAGCCTTATATTCAATAACAGGACATACTTTAGCTTTACGAACTTTTAAAAAT
TCAACGATAATCGATTTCTTAGGTTGAATAGGAGGTAAACCTTTATACGCCCTATCAATATTTTCTACGT
GTAAAGCATAATCCTTTTTCCATTTATAATCTTTATATTTTTCACGCAAATGTGCAGGAATAACAAATGA
ACCGATAATAAGTAAAACAACCAAAAGCGCAAGTATAAATGCCGATGGAAGAAGAGTCCATAAACTACCG
AAAATAAGCCAACGTTGTAGGCTTTCTGCACAAATAATTGTTAGCCCTACGAGTATAGCACACCCAAAAA
TAGAAACGAAAAATGTAGGAGGCAATAGACCAAAAATATGCGCATAGTGTCTTAGGTCGTTGCCATTCAT
CGTTAAACAGTTTGAATAATTTATAGTGCCAAGAGTTTTCATTAATAATCATAATTATCCTTTCATTGAA
GGCGTAACGGTTGTTAAATACTTAATCATAGCTTCAGCTTCTGATTTTGATAATGAAATTTCTCCATTGT
TTTGACGAATAGAAATAAAATCCGGATGACGGTCACCACCAGCTTTTAAAACACATATAAGTATCAACTT
CGCCTTCAATATTTGAAATGATTGAAGCAGTTCCACATGAATGCGGTTTTTGATAAATCAATACAGCTTT
TCTTCCACCGTTTGACTGTTCATAGGCTTTTAATACATCAAGCAAATCAGTTCTTTTATCAATAGCTAAA
ATGTTATTTTCATCTTCAATGTTAAATCCTTCGGATACTTCATAAAGCGTTACCCATAAATCACCAATGT
CAAAACAGCATTTACTTTTCCACGGCTTTCAAGAGTATGACAAATTTTCTTGATTTCGTCATAACTCATT
TTAATAATATCATCTCCTTGACTAAGGAAGATGTCATTTTTAAATTCAACACGAATTAAACCACTTCCAC
TTGAAATAAACATATTTCCTCACTTTGAAATCATAGTTGGAATAACAGAATCAAGATAAGTCTTTAGTGC
AATAGCTTCGTCTTTGTTTAATGTAATGATATGCGATCGAAAATCGTCAATTTGACGAATAGATACTACA
TCTCCCTCTTCATAGCATTTTGAAACATTTAAAATAGTTTCATCATTCTGATTACAGGAGTTAGTAATAA
TAGCATTACATTTTTAAACCATTTTAAATTATGTTTTCTTTTAGTAGAATCATAAAAATATTTAATGTTA
GTTATAAAATTATCCCAATTATTAATTGATAAGCACATTGACTCGCTTTTAATATTAAATCCTGGGCATG
AAGAATAAAAATGAATTTTATGCTCATCATTAATGCTTACAATTTTATCAGTGTAAGCATATTCAATTTG
GGTTAAACGAACAATTTCACTAGGCGTAATATAACATATCATCTTCTTGCGTCAAACGATACATGTTATT
TACTTTTTCGATCGCTAATTCACCAAAAAGCACACTATCTTCTAATACTAATCGTTTCATATTGATTCTC
TTCGACTCACTCATAATTACATACTCCTCTGAATCATATCAATAATGTTATTCACCAAATTATAAGTAAA
CATTGGGTAATTATATTGAATCATCACATACACAACAAACAAAACTTTCATTCTCTTCTCCTTGGCAGTT
GACAAGATTACTATACCATAACCTTGCCAACTTGTAAACCATTAAATGACGTTTTCGATAAAATTCTGAA
GCTTTGTATGAGCATCAACCATGATTTTCATTTCTTCTTTGGCGAAAGCTATACCTCTTTCACGAGAAGA
ACATTCATAGTCAGAAACTGCATTAGCATATTCTTCAATTAGCTTCATTAAAAACATCTGTTTTTCAGTT
TTCATTATTCCACCTAATCATTTCAAGATATTGAACTAACTTAGCTTTAGATTTATCCAAATCCCTTTTA
GCTGCTTCTATACCGTCGTATGAATATCCTTCACAATGCTCAACTGCTAATTGATATGAATCTATTTCAA
TATCACGTGCTAATTTAATGATTTTTTCAAACTGTTCACGTGTTAGCATAATTAAACTCTCGTATTATGA
TCGATAATTTCATCAAGAAACATATCTAACGCTTCTAAAGCATTATCAACTTTAGCTTCAAGTTCTTCAA
TACCTGATAAGGCAAAGTTAATGCGTTCCTCATCTGCTTTACGAATTAAAGCTACCAATTCCTTAATTTT
ATCCGCTTGTTCGATACTAATCATTATTCCACCACATATGAAAGAGAGAATATTGCACACGCCATGTGAG
TTGCAACTTCATCACACATATTATAACGTTTCTTGAGAAGTTCTACAAGTTCTTCACTAGTAACTTCATC
CATGTCGACGAAAAAATCACCATTAATGATGACGTAGATATTTCCTTCTTGATTAAGTGCTTCAATTTTC
ATGATGTTCTCCTCTTTATCCGATAGTTGTATAGTACCACAGCTCAAACGGAAAGTAAACCGGTAAAATG
AAAAAAGTCTCCCGAAGGAGACTAATGTTATTCGAGGGAAAGAAGATACTTACTCTGGTAAAACATTCCA
GTAATATCATCTATCGTGCTTTGGATGGCTGGAGGCATTTCTTTATAAATGCTGTTAGATTGGTCTAGTA
TGCGATCAATCATTTTAATTGTGTCGGTAGGAAGTTTACTGGCATCTGGAATTGAAGGTGTGTATTTTCT
ACCAGAATACCCCAAATATTGCTCACAAAATTTATCAATCAAATCTGGCAACTCGGAAAAAATAAAATCG
TATGCTTTGTGTCTAGCATAACTTTTAGTTTCAAAATGTGCAGAATGAAAATAAGCTTGTGCAGCCATTA
ATAAACCTAAGTATTCATCTGCCTTTGAAGGTTTTCCACTTTGTGAAAAGTCGCTGAATTTCATTCAGTC
TCCAATTTAATTTTCATAATTCTAGCGTATGATTGTGCCATCTCCGCGCCTCGCTCTATACATTCAAAAT
CAGAAGAGCACGGGTCATTTTTATAGGTCGTTCTCATAAAACTATAGAATTGTTCAGACGATTCTACGCT
TTTATTTTCAAAAAGTGTATAAACGTGCCTAATACCAGATTCCATAAATTTATCAAAATGAGGATCGACA
TTCGCTTCAATTGATGGAGATAAAACAAATGACAATCCTAGCATGGCAAATAGTACCGTTGCTTTTAAGG
CCATAAAGGCCTCCTATCATTTTTGTCCTGTATTTACTTTATGCCGATGCACGGCCTTAACTTTATCAAG
GTATTTTTCAAAATTTCGCAATCTAGTATAGTCTGCCGGAGATTGGTTAAGTGATACTTCTCGACGCAAA
GCTGAAATGATATTTCCAACTTCCCTACGAATTTCATCTAATTGAAGCACAGTAAGATTGCGAAGTTGCT
TTTCAGTTAATTGTAGCATATATACCCCTTTAGTTAGATAAACCTATTTATAACTTTTGCACTAACCGAG
CTTTTTAGTTAATTCATTCCAATGTTTTCTACACAAAGAAACATAAATTTCATCACCAATACAGATTTGA
TTACCTTCTTTAACTGGTGTTCCATCTTCCATTAATCGAGCTGTCATAATCGCTTTTTTACCGCAATGAC
AAACTGCCTTTAGTTCAATAAGTTTATCTGCAATCGCTAAAAGTTCTTTAGAACCTTCAAACAATTTTCC
AGCGAAATCAGTCCTTAATCCATAAGCCATAACAGGAACATTATATGTATCAACAATTCGGCTCAATTGA
TGCACCTGTTCAGTTTTTAAAAACTGAGCTTCATCTACAAATACGCAATGAATATCTTTTTGTGCTTCAG
CCCATTTATAGAACTCGAAAATATCCATATCATCTGTAATAATATTCGCTTCCTGCTTAATTCCAATGCG
AGAAACGACTTCACAGACAGAATCGCGAGTATCAATAGCAGGCTTAAGAACTAATACACTCATTCCACGT
TCTTTATAATTATGTGCAGCAGTCAAAAGAGAAGCAGATTTTCCAGCATTCATTGCTGCATAAGTAAAAA
TTAAACTCGCCATTTTAGTCCTTAGTTAAATTTTCTAAATATGTTTCTAAATCATTTTCAGCTTTATCGA
TAGATTTTACTAATTCGTAATATGTTTCGGCATCTCCATAATCAGAAGATAATTCAAAAGACAAATCCTT
TTCTAAACTAATAATTTCACCAACTAAAAATAATATTTCGTTCTTTTGTTCGCGAGTAATCATAAGGAAT
TTATATAATTAATAAGTTCTTGTTCTTTATTATCGAATTCTTTAGAAAGTTCTTCGTACTCGTTTGCGCT
AAAAGGACCGCATTCATTACAAACTTTTTCCAATTCACTATTTTTATCCATAACTTCGTGGATAAGAGAA
AAGAGTTTGTCTTTTTGTTCTTTGCTTAAACTCATATATTAATTTCCAGAAGTTTTAAAATAATTCGCTT
TTGCTTAAATATTTCCACAGTTAAATGATCAGTATCTTTTTGACCAATTCCAATGGCAAAACCTTTATTA
ACAGCGAGTTCAATTAAATTATCAAGTTCACGTAACACTTCATATTGTAACTCAGAACTATTCATTTCGG
TTTACCTTCTTTAACGAAATCTGGATAAGGATAAAATCCCGAATAAAATCCTTCACCTTTATGATTGATG
CATCCTTTATTAGAACAATAGCACCAATAATCGAAATCACAAACCATTTCATCGTTGCATAAAGCAAAAA
CAACCGGCCATTTACACTTTTCGCAGTGGGCATTTTTAAGAATACTAGTTTGGCTCATAACCATGTCACC
TTTAAGCAGTATTCTTCTACATGCTGTTTACGACCTTTCTTATCAATAAAGGTATATTCAACGAATGTTC
CAATGTAGTCTTTATCTACATCATGTGGACTATTAATTGGGCATTTAGTACGACAAATGCGTTCCCATTG
ACGAATAATTACTGCCTTATTATTTGGGTCATATGGATGTGGATAATGTATATTCATAATAATGGTTCCC
AATCAACAATCACAATTTCTAATTTAGAGGAATATGTATCTAAAATCCCCTCAATAATATCCCAGTTCCC
TTTACCTATGCCTGCGCCAATCCTAGGCATATAGATTGTAGGTTTAATCAGTTTATTTTCACCAAACTCA
TTTAATTCTAACATACAATTCATTAAAGCGGAATACTCAAAATTTGGCCCTGGTTGAAATTGAGTATAAA
GATTAAAGCAGTAAGCTTTATGAGTCCTAAAGTATTTTTCATAGACTGAGTAAGAACCGAGTTTAGTTAC
ATCACCCCATTCAGTCTGTAATTTATCAGCTTCCAAAATTTTAGGGAAAGCTTTGGTTAATTGACCCGCT
ACGCCTGAACCCATAGTATGAAAACAATTACATCCATGCGCAATATTTTTACCTTCAGCGAAAAGGGCGA
CAATATCGCCCTTGATATATTTTACAATCATCTAGTACTCAATCCTCGATTATAAGAATCTACCAAACGG
TCAACCATTGAATGACAAGCGGCTTTATCTTTCTCCTCCGCAACTGAACATTCTAAGGTATTCCACTTTT
TAGCATATCGTTTTAATAATGTATCGTTTTTGTATCTGCTTGATTTATCTCTTTCTCCGTCTTTATATGC
ATATATTAATTTCTGAGCAAATTCCGCCTGGCATGCTTTATTTTTCCCACAATAATCTGCCGCAGTGCGG
TTTACATATTCTCTAATTTCAGTATATGATGTATCTGCTGACGCAGAAGCAGAAAATGAAATTAATCCTA
TACATAAAACCAAAATTTTAGTCATTTACTATTTCCAAAAGTTTATTATTTTTAAGGTAATTAGCCTTTT
CTAGGACTTCAGAAGCATATTTAGAACCTGCTTTAACATTCCATCCCGAATTATAAGAGGATATTGCTTT
TCTTATATCGCCCTTATGTATATTTAACCAATAAGAAAGTTCAATGTACGCCCAGGAAGCTGAATTGGAT
CGTTTATTCAACATTCTTTTTATTTCAGCATCGGTCATATTATAACCAAGTTCCTTAACTCTTGCTCGCA
TAGTAGGCAAATAATTTTGGAACATTCCGTAGGCGTGATGATTTGGTTTAGATTTTAAATTAACTCCGCC
AGAGCTTTCTTGCCATAAAATGGCTGCCATTATATGACCTAATCCGCTCTTGTGGATGTTTTTGTGTGTT
TTATATTTTCCATCCTTAGAAAATTGTTCCCCGAATTGATACGCGTAACGCATGTTATCGAGTTGGACAT
TACTGAAAGTATGCTCGGAGCTATGTGCCATCATTGAAATGGCCAATAGACCAGCGAGTAGTGCTTTTCT
CATGCTTACCTCATTGAGTTTTAATTACTGCTTTAGAAGCCTTTCCTGGTAAACGACGACTGTTAATAAT
TGCCATTCTACATTGAAGTGACGGGTCTTTGAACTTCGCATTAGGTTTACAAACTGTAAATCCAAGCCAA
AGATTTCCATCTGTGATTTCTAAACGTCCAGGACGATATTCAATTCCATCAATAAAATCCTCGTCAATGT
CAGGACGCGGAGGCATACTCAGGAATTCATTAACTTCTAAAACATGGTCTTTTATTTTATGGAATAATTC
AAAAACGTATGTCTCATCAATCTCCCGTTGAATTGCGCGATCAAGAAGATGTTGAGAATATTTTAGATGA
AACGATGAGACCCCTGCTGCTTTTGATGCCTCACGAATCTCATTGTTAATTTGACGAAACTCCGACTCAA
AGTGACGACGAAGCTTATTTCGACGGATAAAAACTTCTGTATTGATAGTCATGTTGTTCTCCTCTTAACT
GATAGAAAAATTATACCACAGTCAAGAGGAAAAGTAAACAGTTATTCTTTAAATCTAATCAATTTATTCA
TAGACTTTGAAACTTCTGCACGAACCTCATGTAGATTTTTGAGCTGTTCAAGACGCTGCGTATAGTAAGC
AATTTCATCTTCTTCGAGACAGTCCTGCGAATCTTCTTTAAGATACCGTGCATAGTCCTGGAAAGCGTTA
CGGACTACTTCCTGGAAGTCATCAAGACTTTGAATTTTCTTAGGAGCAACAGATACACGACGAGGTGCAG
TATAATACTCATAACCAAACCCTGCGCTTAATTGATCCATTAGTATTTTTCCTCTGGTTGGAACACTGCA
CGACAAGCCCACATACTGGCTTCTTTGAGTTTCGTTTTAGCAATAGTTAACTGATCGAGGCTTTCAGCAT
AATTCTTCGCGAATTCACAGTCTTCACAATTATCTAGTGCTTCCCAGAATTCATCATATAAAGCATCAAA
GATAAGTCCTAAACGAACTTCAGCGTCTTTGATAGCATTCACTTTACCGATTTTCTCTTCAGTATGTGGT
TTATCCCTTAATATCTTCAATCATATTTGACTTCCTCACCAGTACATAAATCATATTCAACTAAACGAAT
AGGTTCATGAATGCCATATCCCTGAACAGAAACTTCTGTCGTAGGATAAATTCCATCAATATCACCCATA
TTCCAGGCTTCATTAAATTGCTGTTCGCCTGAATTACTAAACCACTCGGCGAAAGCATTTATCACATCTT
TAGAACCTTCAATAATTATCTTTGCCATTACAAACTCTCGGTAAAGGTACGAGCGATAACGTCGCGCTGC
TGTTCCGGAGTCAGAGAGTTAAAGCGAACTGCATAACCGGATACACGGATGGTCAGCTGCGGATATTTTT
CCGGATGCTTAACTGCATCTTCCAGAGTTTCACGACGCAGAACGTTAACGTTCAGGTGTTGACCACCTTC
AATTTTAACTGTAGGTTGTGGCTCAATTTCAATTTCACGGGCATGCAAACCATAGAAAATTTCTGGGTCT
ACAAAAGAGTCCTCTTTAAAGGTTTTAGAGACAATAATTCGTGCTTGAATACCATCTTCAAAATAAATAG
TACCTTTATGTGTGCCTTCAAGAATTTGATATGCTTTCATATAAACCTCAATTAGAAAATAAATTTATCC
AAGATTGTTCTTTAATTAAAAATGGCTCAGAATCATATGCCATTAAACTGTGGGTAATTAATCCTTTAAA
AGGTCCATCAATAAATTCCATGGTAAAATATGGAATTTTATTCATTAGCCGTGCATTAGGAGCAGTACAC
AAAACTCTGCATCCTTTGAATACGCCTTTTTGTAATTTGTATTGCTTAGGATAAAATTCGCTTAAAATGT
TATTTTTTGCCAAAATTTCAAAATGATTCACCAATTTATTTTTAATAGTTTTTGGCGAAAAATAAAGATA
TTCGAAAAGCTGAGTGTCTGTCATCATTGCATTCCGATTACGAAAAACTGTGGACGAGTAATACCACCAA
TACAACATTTAATATTACAGCAGCAGTGTACAGTGTCAATATGGACACTATAAATCTTATCCATATCAGG
AGATTTGACAGGCTCATCAATTATATACAAAATTCGCGAAAGCGATAAACCTCTGAACTTGCTTCCTTTA
TTACCAATAACTGCGCACAGAATCAGTAAATAAACGAAAACGTATATCATCATTAGAATAACGCGAAAAT
TCCTTTTTGATGTTATTTGCAGAAATTTTAGCGTAAGCTGAAGTATTAGAAAGAACAATAACTGTTCCGC
CATCATACAACCAATTAGCAGCAAAGTTAGTCACAGCAATTGATTTACCAGATTGACGTCCACCATCTAG
TCGAAGTGTGCAATACTGTTTAAGTAAGTCTTCAAATGGCGGGATATTCGTTTTTACAAATTTCTTCTAC
TCTAGCATCAGAATGGTGTGTAAAAGCATTCATCAGGGATAGATAAGGACCAGTTAAAAATGTTCTCATT
TCTTCTCTCTAAATTTGGGCCATTCCATGGCGCATGAATTGTCCATTTCTGTATTTACCCATTACCGCGC
TTGGGCTCGACATTATTACAGGTTGGCGGGAATCCCTCACAGAATCATGAGGTCCAGGTTGTTCCCATGT
TATTTGAACGATTTAACGTACTGAATAGAACCTTTACTATTCACAAAGGCAATTTTACCATTTTTGTTAT
ACATGGTAGCAGTACGTTGATAGCCATAAGTTTGTTTACCAGATTGATAACCAACTAATGCGAAATTATC
TTCACCCATTTTATTCTGTTTAGCGCGAATGCGTTCATGACCATGTGCCATAAGAACCTTAGCATCACCA
GTTGCAATGGATCGACGAGTTTTTTCATCTTCAACTGTATTAACAAAGTCGTCAAATGAATCAAATTTAG
CATGAGATTTATTATACAGTTTTCCATCTACTGCATAATTATATCCCTGTACATCCATCTCAACTTCTGT
ACCATCATCCAATACAGCAGTGATTTTCTGACCTTTTTTAAATTTCAAAAGATCAGTAAAAGATTCAGCA
ATAATTTGAGAATTAATAGCTGCTTCAGTAATAAATTCTTGATAGGTTTTCATGTGTTTCCTTTAAATAT
TTTAATTAGTAATTGTCTATTCAAGTAACTGTGAATATACTATCACAATTCCAAGAGAAAGTAGACAATT
TTATAGATTTTTATACGCGTCACAAGTGCCAGTTCTAAACGTTGCAATGACTCGTTTTGCGCGATTAGGT
GTTTGATTATACCATCTACTTTTAGCTAAGTTAACTGCTGCTTCATCCCAGCGTTTTTGTTGAAGCATAC
GTAAAGAGTTAGTAAATCCTGCCACACCGGTTTCTCCCATTTGGAAGACCATATTAATCAATGCACAACG
ACGAACCGCATCAAGAGAATCATAAACCGGTTTTAATTTAGCATTTCTCAGAATTCCGCGAACAGCAGCA
TCAACATCCTGATTAAAGAGTTTTTCAGCCTCGTCTTTGGTAATTACACCATTGCAATTACGTCCAATAG
CTTTATCTAATTCAGATTTAGCAACACTAAGTGATGGACTTTTTGTAAGCAAATGACCGATGCCAATAGT
GTAATAGCCTTCTGTGTCTTTATAGATTTTAAGTCTAAGACCTTCATCTATACGCAACATTTCAAATATA
TTCATAATACCTCCTAAGTATTTATAGAAGGTATTTATAAAATTAAAGAGGTTGTTCATTATTCGGTAAA
GTGAAGGACCCATCACATATTGCCACTGAGTACGAGGAATAAGAGCAAAAGCGTCCATCTCTGGAATCAT
AACGCCATCTTTATTTTCAAAATAAGACTCGCAACGGCAATTTCTGAACATCTCATGCTCTACTGGAATC
GTATAATAAAACAACTGTAGGTCTTTATTACTAGAATATTTAAATACACCTAGGTCTTCTAGAAGGTCTG
GATTATAATTGCCAAAACCAGTCTCTTCTAAACATTCTCTTCGTGCTGCATCTAATGCGCTTAAATCAGA
ATTTTCTACACGGCCCTTTGGAATATCCCAGCGATGTGCCATCATTCCAGTCTTACGAGAACCAGTAACC
CGACCCATAAATAAATCTTTATCTTCGGTCATAAAGATAATACCAGCTGATAGTGTTTTCATTTTAATTT
CCTGCAATCACTCACAAACTCTTTCATTGACTCATTTTCAATATAAGACATGTAGCTATTATATTCCTTT
AATTGTATTTTGTAATCCTTTTTTCTTTGCCAATTTATTTTAAAATTATCATAATGAAAATATAAAATGA
TACCAAAGAATGAAAACAATGAAATAATTTTAGTATAACAAAGCTCACTCCAAACTTCTGTTATATTTAC
TGTGCCGTCGATGTTTAAAATAAGACAGTCAATTAACAATCCAAAAAGACTACCCGCAAGAGCTGCAGCC
AACGCCACAGCAAAAATTAAAAATGACTCAGAAAACGAATATTTGACTTTATTTAGTTTTGGCTTTTGCA
TCGTGATTCCTTAACAAATTTCATAATTTCATTAAATTCATACTCAGCTAGTTTAAGCTGGTGTTCCTTT
TTAATCTTTTTACAATGAGCTTTCCAATCGTGTACACGTTTACGATAATGTCTTCCTTGATACCAGTATC
CTACCCAATTTACAGGTACTAATAAAAATGGAACTACCAATGGAAGAGTTAGCATTAACATAATTATTAC
GCCAGATTCAATATCAGTCATAACATCTAAAACACCTCCAATAATCAATAGAATTACAAATGATATGAGT
ATCACAGGACCTATTAATACGTCAGTAGGAATTATCTGGCGCTTTAATTCATACTTCAAAGGTTTACTTG
GAAGGTATAGTGATGGCTTTGACATATTCTCTACATTCCTTAACAAATTTTTCTAGTAATAAATCACTTT
CAAAATTAGGATTTTTCACTAATTTATCAAAAAGACCATCAACAATAGTTAAAATATTCTTTTTGCTAAG
AATACGTTTATTTTCATGCTTCGTTTCAGAGTCAACTATAAGAGTAAAGAAATATTTCTTTCCCTGAAAT
TTTACCGTAGTATCAATATAAAATAAATTTGACTTTTGTAAGTTACGTTTAAACCATGCGTCACTTAAAC
TATAAACACCGAGATAATCAAAATCGTCGTTTAAATAACAAACTGACCATTCAGGAGAAATGAAATCAGT
AAATTCAACATCAAAATCACATGTCAATAAATGAATTGATTCAATATTGTTAATAAGTATTCCAGGACGT
ATTAAAGACTTTTTACCTCTGGAAAATCTTCCAGAAAGACTTTCATCAGTTTCATATGAAGAACCCCAAT
AATAATTACGTCCTTCTGCCATACGTTTAAGAGCATTTAGTAATTGGTCTGGAACATCAACCTGTCTTTG
GAACTCTTCAAACATTGAATTGAAATCACTTTGCATTTTCATTCCTATTTACTCCAAGTAATAGGGGGCC
GAAGCCCCTTATCATTATTTCAGAGAATTAATATATTCCTGAACATCGGCAGAGGTAGTTTCAACCCCAG
AAATATTGCCATTAAAGGTTTCAACTCGAGCAAGAGTATCTTCAATATCAACCTTAGTCAGTGCTGCAAT
TTCAACTACATCATCAGCAGTACTAATTCCAAGGGCATTTGCTGCACGAGTTTCACGGATATATTCCAAT
TTAACTGCAAGTTCTTGGCGAGCATCATCTAACTCAACTACTTTCTTAGCGATTTCAATTCGCATTTCAG
CATAACCATCAGCTTTAGTAGTCAGCTGTTCAGCTGTTCGACGATATAGCAAACCGAGTTTAGCATGCAT
TGTTACATCTTGACCTTCGGAAAGAAGCTTGCGAATTTCACGCTCTTTTGATTCAGCCTGTTTATTCTTT
TCAACAATAAGTTCACGAATACGTTTTTCTTCATTAATAGATTTAACAGAAGCAGTTTTTAGGTCTTTAA
TTTTATCAAGCAGTTTTGCTGCTGCGGCAGTATACTGTTCTTCAACAGATAGATTTTTAGCCATAGCAGA
ACCAAGTTTAGTGCGAATAAACTCAACAATTTTCTTCAGTGTGTTCATAGTATTTCCTTAGGTTAATTAA
GATTTAAAATCCATGAGAGTATTATACTCCGGATAGTTTGTAAACTATTTCAACATCGCCTTTTGCTGCT
TTATAACCTTCAGCCCAAGATACAACCGAGTTTTTATCTGAAGATTCAAATTCTGGCATTGGGCTTTCGC
CAATGTTCACGCAATATGTTTCTTCATTTTCGTCGAACCAAATAATTAAAGTAGTCATTTATTTCTCCGT
TTCTGTATTTGTTTTTGATAAGTCTATAATAACACCGTCCTTGGTGTTTGTACACAATTATTTCATATTA
TTGAAATATTCTTCTGCGATTTCGTCGTTATCATGGTAAACTTTAGAAGACAGTTTAACATAACCTTCAG
CAGTGAACATGTTAATCACGACCTTTACAGTATACCACTGACCATCTTCATTACCCATTACTGCGTAAGT
TTCAAACATCGGATGGTCAGGACCGATAACTTTAATATCATTCACTGTACGACCGAAATCTTCTGAAACA
CATTTCATAAAGAAGTTGAACAGTTCACCGTAATTATCCATTTTATTCTCCAAGTTGTTTTCTGTATCAG
TAGTTGATAGTTGTATAGTACCATGGAAGAACAGGGATGTAAACAGTTTTGTGAAAAAATTTTTAAAAAG
TTTTAGGGAATTCTAGGGGGGGGAGGGGCAATTAAAAGATAGGATAATATATTATAAAGGGTATAAACTA
AATGATGCCTAGAGAGGTCTGGAAAGGCCTAGATACCAAAAAGCCCCAACCTTTCGGTCGGGGCTAAGCC
TTGCGGCAACCTTGTCGGGGTTCCACCTGCTAAGGCAAGTGTTTGTACGAAACGCCGGGATTTGAACCCG
GTTATTAAGTAGTTGACGCTACTCAATATTTTTAAAAGGCCATATCTCGACCATATCCGAACGTTCCGTC
AAAAACGCTACTCGGCTTACAGCAAAGATATTTCCTCGAATCGATAATTCGGTGCGCCGTTTCTGCTGTG
ATAGTAAAGAGCCAGAACACAGTAAAACTGTGGGAGGAACTATACTCCAGGGAACATCAGTCCGACGACT
TACCGGTAGCGACCCGGTTTCTTAATATTCTTTTAAAGCATCAATCTGTTCACGGCGTTTACGCCATAAA
TCAATTGCTTCATACGCGGATTCAGCATTTCGAATTAGCCGGCATTTATGTAAAGACTTGTGATTTTGGT
ATTGTGTAGATAATGGAATTTTATCTAAAAGGTCTTTACGTTCAAAGTATTCGTAACCATCTAAACCAAA
TGAACGATTTTTGAGAAATTGCCAATGCCTAAATTCGTTTTCGACATAAACATAGTCTGCATGCTGATAA
AGCAAATTAATTACACGTTCAGAAATAACAGTGTCATTATGATTAAAATAGAATGTTAAATCATGAACGA
CTAAATAAACATTACCTTTCATATTTTCCTCACTTATAATTGGTCGAGGCAGTAGGGATCGAACCTACGA
CCCAGGACTTAGAAGGTCCTTGCTCTTCCTTCTGAGCTATGCCTCGTATTTGGCGGACGTGATAGGATTC
GAACCTATAACCAATCGCTTAACAGGCGATCGCTCTGCCATTGAGCTACACATCCAAATTGGTGGGGAGT
GATGGAGTCGAACCACCCGAGTCGCAATGACAATGAATTTACAGTCCACACCGCTACCTCTACGGGATAA
CTCCCCCAAATTAATTTGGTGGCCCTGGGTGGAATTGAACCACCATCTGGCGATTATGAGTCGCTTGCTT
GAACCTTCCAGCTACAGGGCCAAATTTTCTTATTTTATGTAATATTTATTTAAAAACTTTCTAGCTTGAG
TATGGCTAACATTTATAGCGTTTGCATAATTTTTAATAAAACCTCGTTCATCCATATTAAAATTTTCTAA
TATTTTTAATCGTCTAGTTATCTCATCTTTGCTTAAGGTACTTGCATTATTTTTAGAAATTTTTTCTAAG
GACTGTGCCGAGTGTTTTCGACCATTAAAATTAAAATTTTTAGATTTTGGAGGAAATCTATCATTTAGTC
TCGCATCTTTTGTATTTTGATTATTAGTTGCGCAATATATGTTATTTAATGAATATGGTCCTTTATCACC
GAAACGGCACATGCAGTATTCATGACCCTTTCTTCCACGCTTATCATATTTTCCCGTTGATTTCCACCAA
TAGCCATTCATCAAAAGTTAAATTCCATTCAATGTTTCTACGTATAGCAGAATTCCGCTGAGAAATATTT
TGCATAATCTTCTTTCATCACAAATTTCTCTACTTATTCAATACACCGAGCTAAATCAGCAAAACTGGCG
GAGGCGATAGGATTTGAACCTATGAGTCGCCGGAGCGACTGCCGGTTTTCAAGACCGGTGCATTAAACCA
CTCTGCCACGCCTCCAGTCTCCATACAAGGATTTGAACCTTGGACCTCCTGATCCCAAATCAGGCGCTCT
ACCAAACTGAGCTACACGGAGTAAATTAAATTGGAGCGGATAATGAGAATCGAACTCACATCATCAGATT
GGAAGTCTGAGGTAATACCATTATACGATATCCGCAAATTTGGTGCGAGAAGTGGGACTCGAACCCACAA
GGAAATCATTCCGCAGCATTTTAAGTGCTGTGCCTTTACCAATTTGACCATTCTCGCGCTGGGAATAAAG
GACTCGAACCTTTGCATCTAGCAGTCAAAGTTCTATGCCTTACCAACTTGGCTAATTCCCAATTATTAAC
AAAGGCTCTCAAATAAGAACCCTTGATGATAGAGGGTATTAATCAATGCGATATGAGTTAATAATAACAA
ATATTTCTTAAAGCAAATCAACCATTTTAACAGTCGGCAAAACAATTTCTTCTTCGATATAAGCAAATTC
TACATGTTCAACTACACGCAAGAAATCATATTCATAGTATTCAGAAGCATGACCAAGAATATCAATGAGG
CCTTCAAATATCTTATTACCATTCACAAAGAATAAGTCAAATACACGTTCTTCATCTTCTTCGGATTTAT
TACCAAGGTCAACTTCTATATCAAAGACCTTTTTAATGAATTCTGGATAAAGTTGGTCTGAGAACAGTCC
TTCAACCAAATATTCATATATAAAAAGCTCTTGCTCGCTGAACAACCCATTACCACAATAACGGTCAGCT
TTAGTGCTAGAATGACGACTCTTAAACTTCTTCAAAAGATATTTAAATTGTTGGAGCTCATGCTCTTCTA
CGCCAAACAGTGTTTTGGTTTTATAGTTATCACCATCATTTTCCCAGGTAGTGACATCAATTACGTAACC
CTTAGGAATTGTGCTGCCTAAACGAATATACATTTGTTCACCATATTAATGTAAGTATATTTAATACATT
CAAGACCCAAAGGATTCTTGAAAATATCATATTCAAGAGGACCTTTTTCTGTTTCAATAAAGAAATCAAA
ATTTACTGTATTAAATTTACGGTCTTCCTTCACTAATTTAACTTGAGAAGATGAACGGTCAATGTAAACC
TTTTCAACTTCAAAACATGTTAAAATGCCATAATCATCAATCAAGGCTTTAGCCGCATCTTGATCATATT
TATATCCATTTTCAACGGACGATACTTTCGCATAAAGAATCATTATTAACCTTTAGAAATTTTATCCATA
ACGATAGCGATTAAACCAATTAAAAATGCTACTACAAGTGAAAACACATTTTCTGCTGTAGTCAATAATC
CGCATATAAATCCAACAAACATTGAAAAACTAAAAGCGGAAGCAGAAATTGCAATAGCAACATTTCGAAT
TAATTCACAACGTTTCATTTTATTCTCCTCAGTAGTTGATAGGGTAATAATATCACCACCCTATCTAAAA
GTAAACAGTTTATAAACTATTTTATTCCGCGTGATGCAATTGTATTCTGCCGTTTAGCACCAGTTTGTTT
AAAGTCATGATTGTCGATTTGATCGGTACGAGCAACTCCGAATGATGATTTGATCTTAGCTTTAGATCCT
TTAGTTATAGAAATAAACATCTCGGAAGCCCCTTTCTTAAAGTCCGAGGCGATTACTTCAACGCCGTTCT
TAGCAAGTGACTTCAGAATTGCCTCTGCATACTCATCGTCAAGACTCGTCTGAGTATTAATAACGAATGT
CTTTGGCGCAGCCGCTTCATTGATAAATTCTTTAAATGTTTTCATTTTATTTTCCTAATTAATTTTGATG
AGGTAATAGTATCACAACTAAAACCCTATGTAAACAACTTTGTGAAATTATTTTAAATCTTCTAATCGTT
TCTTCATCTTAGAACCGTTCTTAGCGATTTCGCCTGCATCAGAGCATAATGCTAAAAGCGCTTTAACTTT
AGTTTGGTCTCCTTTAAAAGATGAAGGATCAACAGCAGCAAGTTCTTTAATACGAGAGAAAAGACGCTCA
GCTTCAGCTAAAGCCATTCCAAGTTTTACTTCCATACCATGGGAAGATTCAGTAATAGTAGTTTTTGTAG
CAAACTCTTTGAAAGTTTTCATTTTATTTTCCTAATTAATTTTGATGAGATAATAGTATCACTACCTCAT
CAGTATGTAAACAACTTTGTGAAATTATTTTAAATCATCTGCCCAATCGAGTTTAAGAGGCTCTTTGTAT
TCACGATCTAATACGACCGGAATTTGTACATCACCGCTAAATGATAGGGGCCCAACATTATAAGACAATG
TTATATGCGGTGTGTAATCATCAAAATCATGTGTAGCACCTAATGCCCGCGCATACATGTGTCGACAGCG
CAGATATTCAGAATCTAGCACAAGTACAAGAGTCGATCCATCTTGTGTTTTCCATACTTCTAAATGTCCA
GAAGAAGCTACTTCAAAACTTCCACTCGATGGAACATATGGAACATTTACTCTTGAATAACATATAGTCG
AATGAATTTTTTCTCTAGGAACTGGATTAGGAACACGTAAAGAGCGCTGGAGTTCTTCCAGCGCATCAAG
TGTTAATTCTGAAAACTTAGCTGCTACATAAAGACCCGTTGAAAAGTCTTTAAATTCCATTATTCTTCAT
CTTTTGCTTCATCTGCAGATTCAGCAGTAAGATTCTTGACAGCTTCAACGATTTCTTCAACTTTGATGGT
ATCGCCAGTGATACCTACTGCACGAGCAATTTCAGCCAAAGTTCCTTGCAGAATTTTGGATTCTTCCATC
AGACGAGCCGCTTGGTCCTGTGTATCAAGAATGCGAGATTTCAGAGTTACGATTTCAGCAGACAGTTTTT
GTTCAATAGTTTGTTCAGACATTATAGTACCTTTAGTGTATTTTTAATTTTAGAAAAAAGTTCTTCAATA
GAACCATCGTTTGTAATTACTAAATCGCCATCACGAATTGGCAATCCAGCTTCTGTAATATGTGTATCAT
TGGATTTTTGACCAGGACGAACTACATGAATTACTGTAGCACCCATCGCCCTAGCCGCATCCATTTCATG
ATCTTGACGGGTATCAGGAACGATATAATAATCATAACCTGAGTTAAATTTATCAAGATAATCTAAAGCA
AATAATTTTACCCAGTACATGCGGTCGAAGTTATTAACAATCAAATCCGTACCTAGGGCTTGCATCAGAC
GACGGACTGACCATTGATCTTCAATATTATTTATAACGTCAGTAATCTTGTTAAATGCTACGAAATTAAC
TGATTCTTTTCCTTCGTCATCAAAAACAAACACACCTTTAATTGGGCTTTTACCATTAAGATAGCAAAAT
GCTTGTTCCATAATCGTGATTACTTCTAATTTAGTCAGATTTAAATTAGTCTCACGATCATAGTCAATTC
CTTCAAACTCTTTACGAGTTAAGCAAGGATAGTCAGTGTTTGCTGCAAATACTCCCCATGCATAAGCCAA
TGCATCCTTAATAGGACCAGCAAGTTGGTATTTAACTGCAGAATAATTGCTCATGATAAAATCAGCAGTA
GTATCTTTTCCACTACGCTTTACACCACTTAAAAAGATTAGTTTCATGTGTTTCTCCTCAAATTTAATTA
AGATTATAACACACAAAACTGAAGCATTAAACTTCTGCTATAATTTTTCCATCTTTTTCTACTTGAAAAT
AGGTGTAAGGAATCGTAGCTGTACATACTAAAGCCGGGTCTGAATCTTCTGTGTAGCTAAATTCTACTTC
AGATAGGTCAGAAACCCAAGGCTTATAAAAATTTATTGACATCACGATTTCAGTTTTGCTATTATCTAAG
ATGTAAAGCGTAATGTACTCAGGACCTGTTTTTTGGGCAGTATTTTCACCTGTAAGATAGTTGCTAGTTC
CTAGCATCCATTCATACATTCCTATCCATGACTTAAGTTCTTCATCAACTATAAATCTCACAATGAGTGG
ATCGTACTCAAATGTAGCACCTGGACGTTGTGCTCGGCCCAGTCCAAACGGCCCAGTCACGGTATCAGTA
ACAGGTATTCTAATTCCTGGAATAGGAACTGACTGAGCATTTAAAGTAAAAGCAGATGTAGTATTACTAT
GTGGTATTGATACTACAAAGTTAGTTGTATTTGCTTGGTTAAAAATTTGTTGCAGAGCTTGCGACATATA
TTCCTCATAATGCTTTATAACTGTTGGTGGTATAATGGGTCTAAGTCCCTTCCATTCAATTCCATTTAGA
ACAAACAACAGAAAAGAATGGAAGATAATAGAATTAGATATTTGACCAGACTTTGTTTGCAGAGAAACGT
TTTCCTTTTGAAACGAACTGCTGAAGTGGCATCAACACAACGTTCGCCCAGTCTTTCGGGGCGATTTCAA
CAAGGCTACCCATAATATTACCAGGTATATACGCCTTAATCATTTGATCTGCACCTCTAAATCCTTTCAC
TTGACTCCAATCAATTTTTAATTTCGTTTTATTAGTAATAGTAGGTGTATTTGCATATTGCTTTAAAAGC
TCTTCTAGAAATTGCTGACGAGCTTTAGGTGGAATATAGTGCAAGTTCAATCCGTACATTAAATTATGCT
TACCTAAACCAAGGTAAATTATCAAAGGAAATTTATCCCAATAAGGAAGAGTTTCCTTGTGTTTAGCATC
ATAAGCAAAAGCATATATTCGTCCCGGCTGCGGGCGAACAACTTTATGTCCTTTTACTTGCTTAATAGTT
TCGGCAAACCACTTTCTGGTTTTATTATTAATTGCTGCACCTTCATTACGAATTTTATCACGCAATGTTT
GTCTGAATGAATTTATCATAAGCAGTTGTCTTTCTTGCTTATTGAGTTTATTCATTGGTTTTGATTCAAG
TTTTTGAATCTTTTCAGCCGTTTTAATTCCTGAAGCATATTTTGACATTGCTGAAGTAAACGTAGAGTAT
TTGATTCCTCTTTCTTCAGCAAATTGCTTTCCTGTCATTCCTTTTGCTTTGGCCTTTTTGTATTCAAGAC
CTATCTGAATCCATTTCTTTTCGTTTAATGATTGCTTAACCTTTGGAACTTGGGGAGTGCTTTCATTAAT
TATTTGAAAAATAGCCATTATGCCCCCTTAAAGCCAAGAGCTCGTAATCCATCTTCTGTTAGAATTCTAA
ATTTTATTCCACGCTTTTCAGCTAAAGATTGTGCTGCTTTCCATTTGTCGGTATTAACAGAATATGTATA
AATTTCATTCATAAATCTTTTCTTCGCTGCGGTTGTTAGATGTGCTGGTTTAACCGGTGGTTGTGTTTCT
TTTTTAGGTTTTATTTCAATAAAAAATTCTTGCCCAGAAGAATCTTTCATCCAAATATCCATGAAGTATC
TACGTTTTTTCCCTTCTGCATTACAAAAATAAGGAATTACTGCTGTTTCACTACCCCATGCAATAATTTC
TGGATTTTTATCTAACCATTCAAAAAAGAATTTTTCCCAATTTGATCTATACGTAATTTTTTTAGGGTCA
CCTCTATACTTTGATATATTTTTAGGAACCCATTTTCCAGAATATGCCATTGGATTCTCCTTATAAATAG
ATAATATATTTATAAACAGGAGGGCCCATGCTCTTTACATTTTTTGATCCGATTGAATATGCGGCCAAAA
CGGTGAATAAAAACGCGCCGACTATTCCTATGACAGATATTTTTAGAAACTATAAAGACTATTTTAAACG
CGCTCTTGCGGGATACCGCTTACGTACTTATTATATTAAAGGTTCACCACGCCCGGAAGAATTAGCAAAT
ACTATATATGGAAATACGCAGTTGTATTGGGTTTTATTGATGTGTAATGATAATTATGATCCGTATTATG
GATGGATTACTTCGCAAGAAGCTGCTTATCAAGCATCTATACAAAAATACAAAAATGTGGGTGGAGACCA
AATAGTATATCATGTGAATGAGAACGGTGAAAAATTTTATAATTTAATATCATACGATGATAATCCATAT
GTTTGGTATGACAAAGGCGATAAAGCTAGAAAATATCCTCAATATGAAGGAGCACTTGCTGCGGTCGATA
CGTATGAAGCGTCTGTTCTTGAAAATGAAAAACTTCGTCAAATAAAAATAATAGCAAAATCAGACATCAA
TTCATTTATGAACGACCTTATACGTATAATGGAGAAATCTTATGGAAATGATAAGTAATAACCTTAATTG
GTTTGTTGGTGTTGTTGAAGATAGAATGGACCCATTAAAATTAGGTCGTGTTCGTGTTCGTGTGGTTGGT
TTGCATCCACCTCAAAGAGCACAAGGTGATGTAATGGGTATTCCAACTGAAAAATTACCATGGATGTCAG
TTATTCAACCTATAACTTCTGCAGCAATGTCTGGAATTGGGGGCTCCGTTACTGGTCCGGTAGAAGGAAC
TAGAGTTTATGGTCATTTTTTGGACAAATGGAAAACTAATGGAATTGTCCTTGGCACGTATGGTGGAATA
GTTCGCGAAAAACCGAATAGACTTGAAGGATTTTCTGACCCAACTGGACAGTATCCTAGACGTCTAGGAA
ATGATACTAACGTACTAAACCAAGGCGGAGAAGTAGGATATGATTCCTCTTCTAACGTTATTCAAGATAG
TAACTTAGACACTGCAATAAATCCCGATGATAGACCACTATCAGAGATTCCAACCGATGATAATCCAAAT
ATGTCAATGGCTGAAATGCTTCGCCGTGATGAAGGATTAAGATTAAAAGTTTATTGGGATACCGAAGGAT
ATCCGACAATTGGTATTGGTCATCTTATCATGAAACAGCCAGTTCGTGATATGGCTCAAATTAATAAAGT
TTTATCAAAACAAGTTGGTCGTGAAATTACTGGAAACCCAGGTTCTATTACGATGGAAGAGGCGACGACT
TTATTTGAGCGTGATTTGGCTGATATGCAACGTGACATTAAATCGCATTCTAAAGTAGGACCAGTCTGGC
AAGCTGTCAACCGTTCTCGTCAAATGGCGTTAGAAAATATGGCATTTCAGATGGGTGTTGGTGGTGTAGC
TAAATTTAACACAATGTTAACTGCTATGTTAGCAGGAGATTGGGAAAAAGCATATAAAGCCGGTCGTGAT
TCATTGTGGTATCAACAAACAAAAGGCCGTGCATCCCGTGTTACTATGATTATTCTTACGGGAAATTTGG
AATCATATGGTGTTGAAGTGAAAACCCCAGCTAGGTCTCTATCAGCAATGGCTGCTACTGTAGCTAAATC
TTCTGACCCTGCTGACACTCCTATTCCAAATGACTCGAGAATTTTATTCAAAGAACCAGTTTCTTCATAT
AAAGGTGAATATCCTTATGTGCATACAATGGAAACTGAAAGCGGACATATTCAGGAATTTGATGATACCC
CTGGGCAAGAACGATACAGATTAGTTCATCCAACTGGAACTTATGAAGAAGTATCACCGTCAGGAAGAAG
AACAAGAAAAACTGTTGATAATTTGTATGATATAACCAACGCTGATGGTAATTTTTTGGTAGCCGGTGAT
AAAAAGACTAACGTCGGTGGATCAGAAATTTATTACAACATGGATAATCGTCTTCACCAGATAGATGGAA
GCAATACAATATTTGTGCGTGGCGATGAAACTAAGACAGTTGAAGGTAATGGAACTATCCTAGTTAAAGG
TAATGTTACTATTGTAGTTGAAGGTAATGCTGACATTACAGTTAAAGGAGATGCTACCACTTTAGTTGAA
GGTAATCAAACTAATACAGTAAATGGAAATCTTTCTTGGAAAGTTGCTGGGACAGTTGATTGGGACGTTG
GTGGTGATTGGACAGAAAAAATGGCATCTATGAGTTCTATTTCATCTGGTCAATACACAATTGATGGATC
GAGGATTGACATTGGCTAATATACTTCCAATGAGCGCTGATTTAGGAGAATCCATGGAAGGTTCTTCTAT
CGACGTCACCTTTACCGCTCAATTAGAAACAGGTGAAACGTTAGTATCTATAAATATAACTAGTTACGAA
GAAACTCCTGGAGTTTTAGTAGAAGAAAATCGCTTATATGGAACATATGAATCTGTATTTGGTTTCGGAA
ATGACGCGTTGAAATATCGTTTAGGCGATGAATTTAAAACTGCTGCTTCATGGGAAGAACTTCCTACTGA
TTCTATACTCAGTTGTATTTGTGGAAAGCTCCTCAAAACCTCCAGAAGACATTCACTTACGAAGTAACAT
TAATATATGACTACCAAGAACAAAGTGAATCTGGAGGTTCTGGCAGTAATTCTAGGTCATCTTCTGATAC
TACTGAACCGACAGATCCTCCTGCTCCAGTAAGAAAAACTCTAGTTAAAAATTATACTAAAACTATAGTT
GGAAATTGGAGTCGTTGGGCTAATAAATTGAGAAGCTATGTGTATGAGAGGCCATAAATGTCAGGATTAA
GTTATGATAAGTGTGTTACTGCTGGCCATGAAGCGTGGCCTCCAACAGTTGTGAATGCTACACAAAGTAA
AGTATTCACTGGAGGAATTGCTGTTCTCGTAGCAGGCGATCCAATTACAGAACATACAGAAATTAAAAAG
CCATATGAAACACATGGCGGAGTGACACAACCCAGAACTTCTAAGGTATATGTCACTGGAAAGAAAGCTG
TTCAAATGGCTGATCCAATATCATGCGGTGATACTGTGGCTCAGGCATCATCTAAAGTATTCATTAAATA
GGATTTAAAATGGCAAATACCCCTGTAAATTATCAATTAACAAGAACAGCAAATGCTATTCCCGAGATAT
TCGTCGGGGGTACGTTTGCTGAAATAAAACAAAACCTCATTGAATGGCTTAATGGCCAAAATGAATTTTT
GGATTATGATTTTGAAGGCTCAAGATTAAACGTTCTGTGTGACCTTTTGGCTTATAATACGCTGTACATT
CAACAGTTTGGTAATGCTGCTGTGTATGAAAGCTTTATGCGTACTGCTAACTTACGAAGTTCAGTTGTTC
AAGCTGCGCAAGATAACGGATATTTACCTACTTCAAAATCCGCTGCGCAGACAGAAATTATGTTAACATG
CACTGACGCATTGAATAGGAATTACATTACGATTCCTCGCGGAACTCGCTTTTTAGCATATGCAAAAGAT
ACTTCTGTTAATCCATATAACTTCGTTTCTACCGAAGACGTTATTGCTATTCGTGATAAAAATAACCAAT
ATTTTCCGCGTTTAAAATTGGCTCAGGGACGTATAGTAAGAACTGAAATCATTTATGATAAATTAACACC
TATTATCATTTATGATAAAAATATTGATAGAAACCAGGTTAAATTATATGTTGATGGAGCGGAATGGATT
AACTGGACGAGAAAGTCAATGGTTCATGCTGGTTCAACATCAACGATTTACTATATGCGTGAAACTATTG
ATGGAAACACTGAATTCTATTTTGGCGAAGGTGAAATTTCTGTTAATGCTTCTGAAGGAGCTTTGACTGC
TAATTATATTGGAGGTCTTAAACCTACTCAGAACTCTACGATTGTTATTGAGTACATCAGTACTAATGGT
GCTGACGCGAACGGAGCAGTAGGATTTTCATACGCAGATACATTAACAAATATAACTGTCATCAATATTA
ATGAAAATCCAAACGATGACCCAGATTTTGTTGGGGCAGATGGAGGCGGTGATCCAGAAGATATTGAGCG
TATTCGCGAATTGGGTACTATTAAACGCGAAACCCAACAACGATGCGTAACTGCGACTGACTACGATACA
TTCGTTTCAGAGAGATTTGGTTCTATTATTCAAGCAGTTCAAACTTTCACTGATTCTACTAAACCTGGGT
ATGCATTTATTGCTGCTAAACCTAAATCAGGATTGTATTTAACTACTGTACAACGTGAAGATATTAAAAA
TTATCTCAAAGACTATAATTTAGCTCCTATTACGCCATCAATTATTTCTCCTAATTATCTTTTTATTAAG
ACTAATTTAAAAGTCACATATGCTTTAAATAAGCTGCAAGAATCCGAACAGTGGCTTGAAGGTCAAATAA
TTGATAAAATTGATCGCTATTATACCGAAGATGTAGAAATTTTTAACTCATCTTTCGCTAAATCTAAGAT
GTTGACATACGTAGATGATGCAGATCATTCTGTCATTGGTTCATCAGCGACTATTCAAATGGTTCGTGAA
GTACAAAACTTCTATAAAACGCCTGAAGCGGGTATTAAATACAATAATCAAATAAAAGATCGTTCTATGG
AATCTAATACGTTTTCATTTAATTCTGGACGAAAGGTTGTAAATCCTGATACTGGTTTAGAAGAAGATGT
ATTATATGACGTTCGTATAGTATCAACAGACCGAGATTCTAAAGGAATTGGTAAAGTTATTATTGGTCCA
TTTGCTTCTGGCGATGTTACAGAAAATGAAAACATTCAGCCGTATACAGGCAACGATTTTAACAAATTAG
CAAATTCTGATGGACGTGACAAATACTATGTTATCGGTGAAATAAATTATCCAGCTGATGTGATTTATTG
GAATATCGCTAAAATTAATTTAACATCTGAAAAATTTGAAGTTCAGACTATTGAATTATATTCTGACCCA
ACCGATGATGTTATCTTTACTCGCGATGGTTCACTGATTGTATTTGAAAATGACTTACGTCCACAATACT
TAACTATCGATTTGGAGCCTATATCACAATGACAGTAAAAGCACCTTCAGTCACTAGTCTCAGAATTTCC
AAGTTATCCGCAAATCAGGTGCAAGTACGCTGGGATGACGTTGGTGCTAATTTCTACTATTTTGTAGAAA
TCGCTGAGACAAAAACAAACTCGGGGGAAAAACTCCCGAGTGATCAATATCGTTGGATTAATTTAGGATA
TACAGCAAATAATAGTTTCTTTTTTGATGATGCTGATCCATTAACAACATACATTATTAGAGTAGCCACA
GCTGCGCAAGATTTTGAGCAGTCTGACTGGATTTATACAGAAGAGTTTGAAACTTTTGCTACAAATGCTT
ATACATTTCAAAACATGATTGAAATGCAATTAGCCAATAAATTCATTCAGGAAAAATTTACTCTTAATAA
TTCTGATTATGTTAATTTTAATAATGACACTATAATGGCTGCATTGATGAATGAATCGTTCCAATTCAGC
CCATCATATGTTGATGTTTCATCAATCAGTAATTTTATTATTGGTGAAAATGAGTATCATGAAATACAAG
GTTCTATTCAACAAGTATGTAAGGATATTAACCGAGTTTATTTGATGGAATCAGAAGGGATTCTATATCT
TTTTGAGCGTTATCAACCTGTAGTTAAAGTATCTAATGATAAAGGACAAACCTGGAAAGATGTAAAGCTC
TTCAATGACCGTGTAGGATATCCTTTATCTAAGACTGTATATTACCAATCTGCAAACACAACATACGTTC
TAGGATACGACAAGATTTTCTACGGCCGTAAATCTACTGATGTTAGATGGTCCGCTGATGATGTTAGATT
TAGTTCACAGGATATAACATTCGCTAAACTTGGTGTTCAATTGCATCTAGGATTTGATGTAGAAATTTTT
GTCACTTATGCGACTTTACCTGCGAATGTATATCGAATTGCAGAAGCTATTACCTGCACGGATGATTATA
TCTATGTTGTTGCCAGAGATAAAGTTAGATACATAAAAACGAGTAATGCACCTATAGATTCTGATCCATT
ATCTCCAACATATTCGGAAAGACTTTTTGAACCTGATACCATGACTATAACTGGAAATCCTAAAGCAGTA
TGTTATAAAATGGATTCTATTGGTGATAAAGTTTTTGCTCTTATTATTGGTGAAGTTGAAACATTAAATG
CCAATCCGAGGACTTCAAAAATAATTGATTCCGCTGATAAAGGAATATATGTTTTAAATCATGACACAAA
AACATGGAAAAGAGTTTTCGGTAATACTGAAGAAGAAAGAAGACGCATTCAACCCGGATATGCGAATATG
TCAACTGACGGTAAATTAGTTTCTCTGTCTTCGAGTAATTTTAAATTTTTAAGTGATAATGTTGTTAATG
ACCCTGAAACTGCAGCAAAATATCAGTTAATTGGCGCTGTTAAATATGAATTTCCTCGTGAATGGTTAGC
TGATAAGCATTATCATATGATGGCATTTATAGCTGATGAAAAATCTGATTGGGAGACTTTTACTCCTCAA
CCAATGAAATACTACGCAGAACCGTTCTTTAACTGGTCTAAAAAATCTAACACACGTTGTTGGATAAACA
ACTCTGATAGAGTTGTAGTAGTTTATGCTGATTTAAAATACACCAAAGTTATAGAAAATATTCCGGAAAC
ATCGCCAGATAGATTAGTTCATGAATACTGGGATGATGGTGATTGCACTATAGTAATGCCAAATGTTAAA
TTCACTGGATTTAAAAAATACGCATCAGGAATGCTTTTCTATAAAGCCTCTGGTGAAATAATTTCTTACT
ATGATTTTAACTATCGTGTGAGAGATACAGTAGAAATTATTTGGAAGCCAACTGGAGTATTTTTAAAAGC
ATTTTTACAAAACCAAGAGCATGAGACTCCTTGGTCACCAGAAGAAGAGCGTGGATTAGCTGACCCAGAT
TTAAGACCATTAATTGGCACAATGATGCCTGATTCTTATTTGCTACAGGATTCGAATTTTGAAGCATTTT
GCGAAGCATATATTCAATATCTTTCTGATGGATACGGAACTCAATACAATAATTTACGGAATCTTATTCG
TAATCAGTATCCACGAGAAGAGCATGCATGGGAATATTTGTGGTCAGAGATATATAAAAGAAACATTTAT
TTAAATGCTGATAAACGCGATGCTGTTGCGAGATTCTTTGAATCACGTAGCTACGATTTTTATTCTACTA
AAGGAATTGAAGCATCATACAAGTTTCTTTTTAAAGTTCTTTATAATGAAGAAGTTGAAATTGAAATTGA
ATCTGGGGCTGGTACTGAATATGACATAATCGTTCAATCTGATTCTTTGACTGAAGATTTAGTAGGACAA
ACGATTTATACGGCAACAGGAAGATGTAATGTTACTTATATAGAAAGAAGCTATTCTAATGGTAAATTGC
AATGGACCGTAACTATTCATAATCTTTTGGGAAGATTAATTGCTGGTCAAGAAGTTAAAGCAGAAAGACT
CCCTAGTTTTGAAGGCGAAATTATTCGTGGCGTTAAAGGAAAGGATTTGCTTCAAAACAATATAGACTAT
ATTAATAGAAGTAGATCATACTATGTAATGAAAATTAAATCCAATTTACCTTCTTCCCGCTGGAAATCTG
ACGTTATTCGTTTTGTTCATCCAGTAGGATTTGGATTTATAGCAATTACCCTTTTAACAATGTTTATTAA
TGTTGGTTTAACTCTTAAACATACAGAGACTATAATTAATAAATACAAAAACTATAAATGGGATTCTGGA
TTGCCTACTGAATACGCTGATAGAGTAGCTAAATTGACTCCAACTGGCGAAATTGAGCATGATTCAGTAA
CAGGCGAAGCAATTTATGAGCCTGGCCCAATGGCTGGTGTAAAATATCCTCTTCCTGATGACTATAATGC
TGAAAATAATAATTCAATATTTCAAGGTCAATTGCCGTCTGAACGACGTAAATTAATGAGTCCTTTATTT
GATGCATCTGGAACAACATTTGCACAATTTAGAGATTTAGTTAATAAACGTCTAAAAGACAATATAGGAA
ATCCAAGAGACCCTGAAAATCCAACACAGGTTAAAATAGATGAATGATTCAAGTGTTATCTATCGTGCGA
TAGTTACTTCAAAATTTAGAACAGAAAAAATGTTGAATTTTTATAATTCAATTGGAAGTGGTCCGGATAA
AAACACTATCTTTATCACATTTGGAAGATCAGAACCGTGGTCATCAAATGAAAATGAGGTGGGCTTTGCC
CCACCTTATCCTACCGATTCTGTATTAGGTGTAACTGACATGTGGACTCATATGATGGGAACAGTAAAAG
TTCTTCCATCAATGCTTGATGCAGTTATTCCTCGTCGAGATTGGGGAGATACTAGATATCCGGATCCATA
CACATTTAGAATTAACGATATTGTAGTGTGTAACTCAGCTCCTTACAACGCTACTGAATCAGGCGCGGGT
TGGTTAGTGTATCGTTGTTTAGATGTTCCTGATACCGGAATGTGTTCAATAGCATCTTTAACTGATAAAG
ATGAATGCCTTAAATTAGGAGGAAAATGGACTCCTTCTGCTAGGTCAATGACTCCGCCTGAAGGCCGAGG
AGATGCTGAAGGAACAATTGAACCCGGAGACGGGTATGTGTGGGAATATCTTTTTGAGATTCCGCCTGAT
GTATCTATAAATAGATGCACGAATGAATATATCGTGGTTCCTTGGACTGAGGAATTAAAAGAGGACCCGA
CTAGATGGGGATATGAAGATAATCTCACTTGGCAACAAGATGATTTTGGATTAATTTACCGTGTTAAGGC
AAATACTATTCGTTTTAAAGCATATTTAAACTCAGTTTATTTTCCTGAAGCTGCATTGCCAGGAAATAAA
GGATTTAGACAAATATCAATAATCACGAATCCTCTTGAAGCTAAAGTTCATCCAAATGACCCAAACGTTA
AAGCTGAAAAGGATTATTATGACCCAGAAGATTTAATGAGGCATTCGGGCGAAATGATTTATATGGAAAA
TAGGCCACCTATTATTATGGCAATGGATCAAACAGAAGAAATCAATATTCTGTTTACATTTTAAATTAAG
GGAGCCCATGGGCTCCCTTTTTCTTTATAAATACTATAAACTCATAAGGAAACCGCTATGTTCATTCAAG
AACCAAAGAAATTGATTGATACCGGCGAAATTGGTAACGCTTCTACTGGTGATATCTTATTCGACGGTGG
TAATAAAATTAATAGTGATTTTAACGCAATTTATAATGCGTTTGGCGATCAGCGTAAAATGGCAGTAGCA
AATGGCACTGGAGCAGATGGTCAAATTATCCATGCTACTGGATATTATCAAAAACACTCTATTACAGAGT
ACGCAACTCCAGTAAAAGTTGGCACTAGGCATGATATTGATACCTCTACTGTAGGTGTTAAAGTTATCAT
TGAAAGAGGCGAACTTGGCGACTGCGTTGAATTTATTAACTCTAATGGATCAATATCAGTTACTAATCCT
CTAACAATTCAAGCTATTGATTCAATTAAAGGTGTTTCAGGTAATTTAGTAGTAACTAGCCCATATAGTA
AAGTTACTTTACGCTGTATTTCATCTGATAATTCTACATCGGTTTGGAATTATTCTATTGAAAGTATGTT
TGGACAAAAGGAATCACCAGCTGAAGGTACATGGAATGTTTCTACATCCGGATCAGTTGATATTCCACTA
TTTCAACGCACTGAATACAATATGGCTAAATTGCTAGTTACGTGCCAATCAGTAGATGGAAGAAAAATTA
AAACAGCAGAAATAAATATTCTTGTGGATACTGTTAATTCAGAGGTAATTTCTTCTGAATATGCTGTCAT
GCGAGTTGGGAATGAAACCGAAGAAGATGAAATCGCTAATATTGCATTTAGTATTAAAGAAAACTATGTA
ACGGCGACTATAAGTTCTTCAACTGTCGGTATGAGAGCAGCAGTTAAAGTTATCGCTACGCAGAAAATCG
GGGTGGCTCAATAATGAAACAAAATATTAATATCGGTAATGTTGTAGATGATGGTACCGGTGACTACCTG
CGTAAAGGTGGTATAAAAATAAATGAAAACTTTGATGAGCTTTATTATGAACTCGGTGATGGTGATGTTC
CATATTCAGCCGGTGCCTGGAAAACTTATAATGCTTCATCAGGACAAACATTAACAGCAGAATGGGGAAA
ATCATACGCTATTAATACATCTTCTGGAAGAGTGACTATAAATCTTCCAAAGGGTACAGTTAATGATTAC
AACAAGGTAATTAGAGCTAGAGACGTATTTGCTACATGGAACGTCAACCCAGTTACACTAGTAGCTGCTT
CCGGCGATACGATTAAAGGGTCTGCAGTACCAGTTGAAATTAATGTTCAATTCAGCGATTTAGAACTAGT
GTATTGTGCCCCAGGACGTTGGGAATATGTCAAAAATAAACAAATTGACAAAATTACCAGTTCAGACATT
AGTAATGTAGCTCGTAAAGAATTTTTAGTCGAAGTCCAAGGGCAAACAGACTTTTTAGATGTTTTCAGTG
GAACTAGTTATAATGTAAATAACATCAGAGTAAAACATCGTGGTAACGAATTATATTATGGCGATGTGTT
TAGCGAAAACAGCGATTTTGGCTCTCCAGGCGAAAATGAAGGAGAACTGGTTCCTCTTGATGGATTTAAT
ATTCGATTAAGACAGCCTTGTAATATTGGTGACACTGTTCAAATTGAAACATTTATGGATGGTGTATCGC
AGTGGAGAAGTTCATATACAAGACGTCAAATTAGATTGTTAGATTCAAAATTAACGTCAAAAACTTCTCT
AGAAGGAAGTATTTACGTTACTGATTTATCAACAATGAAATCAATTCCATTTTCTGCTTTTGGATTAATT
CCAGGAGAACCTATTAATCCTAATTCTCTTGAAGTTAGTTTTAATGGAATTTTACAAGAATTGGCTGGAA
CAGTTGGAATGCCATTATTTCATTGTGTTGGTGCCGATTCAGACGATGAAGTAGAATGCTCTGTTTTAGG
TGGAACTTGGGAACAATCTCATACCGATTATTCAGTTGAAACTGATGAAAACGGCATACCAGAAATTTTA
CATTTCGATAGAGTATTTGAGCATGGTGACATTATCAATATCACCTGGTTTAATAATGATTTGGGTACAT
TATTAACAAAAGATGAGATTATTGATGAAACTGATAATCTCTATGTATCGCAAGGACCGGGAGTAGATAT
TTCCGGTGATGTAAATTTAACAGACTTTGATAAAATTGGTTGGCCAAATGTAGAAGCAGTTCAATCTTAT
CAACGCGAATTTACTGCTGTTTCAAATATCTTTGATACGATTTATCCTATTGGAACTATATATGAAAACG
CTGTTAATCCAAATAACCCTGTTACATATATGGGATTCGGCTCATGGAAATTATTTGGGCAAGGAAAAGT
TTTAGTTGGATGGAATGAAGATATTTCGGACCCTAACTTTGCTCTAAATAACAACGATTTAGATTCTGGT
GGAAATCCTTCGCATACTGCAGGCGGAACAGGTGGTTCTACTTCTGTTACATTGGAAAATGCTAATCTTC
CTGCAACCGAGACAGATGAAGAAGTTCTAATAGTTGATGAAAATGGATCAGTCATTGTTGGTGGATGTCA
ATACGATCCAGATGAATCCGGTCCAATTTATACTAAATACCGTGAAGCTAAAGCATCTACTAACTCTACT
CACACTCCGCCAACATCAATAACTAACATTCAACCATATATTACAGTTTATCGTTGGATAAGGATTGCAT
AATGAGTTTACTTAATAACAAAGCGGGAGTTATTTCCCGCTTAGCCGATTTTCTTGGTTTTAGACCTAAA
ACTGGCGACATTGATGTAATGAATCGTCAATCAGTCGGGTCAGTGACAATATCTCAATTAGCGAAAGGAT
TTTATGAACCAAACATAGAATCAGCTATTAATGACGTTCATAATTTTTCTATAAAAGACGTTGGTACAAT
TATTACTAATAAAACTGGTGTTTCTCCTGAGGGTGTTTCTCAAACTGATTATTGGGCATTTTCTGGAACT
GTAACAGACGATTCTCTTCCTCCGGGTTCTCCTGTTACGGTATTAGTATTTGGTCTTCCAGTTTCAGCAA
CAACTGGAATGACGGCAATTGAGTTTGTTGCAAAAGTTCGTGTTGCCCTTCAAGAAGCTATTGCATCATT
TACTGCTATCAACTCATATAAAGACCATCCAACAGATGGTAGTAAATTAGAAGTTACTTATTTAGATAAT
CAAAAACATGTATTAAGCACATATTCTACATATGGAATAACTATTTCGCAGGAAATTATTTCTGAGTCTA
AACCTGGCTATGGTACATGGAATTTATTAGGCGCACAAACTGTAACTTTAGATAATCAGCAGACTCCTAC
AGTATTTTATCATTTTGAGAGAACAGCATGAGTAATAATACATATCAACACGTTTCTAATGAATCTCGTT
ATGTAAAATTTGATCCTACCGATACGAATTTTCCACCAGAGATTACTGATGTTCAGGCTGCTATAGCAGC
CATTTCTCCTGCTGGCGTAAATGGAGTTCCTGATGCATCGTCAACAACAAAGGGAATTTTATTTCTTGCC
ACTGAACAGGAAGTTATCGATGGAACTAATAATACCAAAGCAGTTACACCAGCAACGTTGGCAACAAGAT
TATCATATCCAAACGCAACTGAAGCTGTTTACGGATTAACAAGATATTCAACCGATGATGAAGCCATTGC
CGGAGTTAATAATGAATCTTCTATAACTCCAGCTAAATTTACTGTTGCTCTTAATAATGTCTTTGAAACT
CGTGTTTCAACTGAATCATCAAATGGGGTTATTAAAATTTCATCTTTACCGCAAGCATTGGCAGGTGCAG
ATGATACTACTGCAATGACTCCATTAAAAACACAACAATTAGCTGTTAAATTGATTGCGCAAATTGCTCC
TTCTAAAAATGCTGCTACAGAATCTGAGCAAGGTGTAATTCAGTTAGCTACAGTAGCACAGGCTCGTCAG
GGAACTTTAAGAGAAGGATACGCAATTTCTCCTTATACGTTTATGAATTCTACTGCTACTGAAGAATATA
AAGGCGTAATTAAATTAGGAACGCAATCAGAAGTTAACTCGAATAATGCTTCTGTTGCGGTTACTGGAGC
AACTCTTAATGGTCGTGGTTCTACGACGTCAATGAGAGGCGTAGTTAAATTAACTACAACCGCCGGTTCA
CAGAGTGGAGGCGATGCTTCATCAGCCTTAGCTTGGAATGCTGACGTTATCCACCAAAGAGGCGGTCAAA
CTATTAATGGAACACTTCGCATTAATAATACGCTTACAATAGCTTCAGGTGGGGCAAATATTACCGGAAC
AGTTAACATGACTGGCGGTTATATTCAAGGTAAACGCGTCGTAACACAAAATGAAATTGATAGAACTATT
CCTGTCGGAGCTATTATGATGTGGGCCGCTGATAGTCTTCCTAGTGATGCTTGGCGTTTTTGCCACGGTG
GAACTGTTTCAGCGTCAGATTGTCCATTATATGCTTCTAGAATTGGAACAAGATATGGCGGAAGCTCATC
AAATCCTGGATTGCCTGACATGCGCGGTCTTTTTGTTCGTGGCTCTGGCCGTGGCTCTCATTTAACAAAT
CCAAATGTTAATGGTAATGACCAATTTGGTAAACCTAGATTAGGTGTAGGTTGTACTGGTGGATATGTTG
GTGAAGTACAGAAACAACAGATGTCTTATCATAAACATGCTGGTGGATTTGGTGAGTATGATGATTCTGG
GGCATTCGGTAATACTCGTAGATCAAATTTTGTTGGTACACGTAAAGGACTTGACTGGGATAACCGTTCA
TACTTCACTAATGACGGGTATGAAATTGACCCAGCATCACAACGAAATTCCAGATATACATTAAATCGTC
CTGAATTAATTGGAAATGAAACACGTCCATGGAACATTTCTTTAAACTACATAATTAAGGTAAAAGAATG
ACAGATATTGTACTGAATGACTTACCATTCGTTGACGGCCCTCCTGCAGAGGGCCAGAGCCGCATTTCCT
GGATTAAAAACGGCGAAGAAATATTAGGAGCTGACACGCAGTATGGAAGCGAAGGTTCAATGAATAGACC
TACAGTTTCTGTACTAAGAAATGTCGAAGTTCTCGATAAAAACATTGGAATACTTAAAACATCTTTAGAA
ACCGCAAATAGTGATATTAAAACAATTCAGGGCATCTTAGATGTATCTGGTGATATTGAAGCTTTGGCCC
AAATAGGTATCAATAAAAAGGATATTTCTGACCTCAAAACGCTAACCAGTGAACATACAGAAATATTAAA
TGGACCTAATAGTACAGTTGACAACATTCTTGCTGATATTGGTCCATTTAACTCTGAGGCCAACTCTGTA
TACAGAACAATCAGAAATGATTTACTGTGGATAAAGCGTGAACTTGGACAATACGCAGGTCAAGATATTA
ATGGTCTTCCTGTTGTAGGAAATCCTAGTAGTGGAATGAAGCATCGCATTATTAATAATACTGATGCCAT
TACTTCACAGGGAATACGTTTAAGCGAATTAGAAACAAAATTTATTGAATCTGATGTAGGTTCTTTGACT
ATTGAAGTTGGTAATCTTCGTGAAGAGCTTGGACCGAAACCACCATCATTTTCACAAAACGTTTATAGTC
GTTTAAATGAAATTGACACTAAACAGACAACATTTGAATCTGACATTAGTGCTATTAAGACCTCAATAGG
ATATCCAGGAAATAATTCGATTATTACTAGTGTTAATACAAACACTGATAATATTGCATCTATTAATTTA
GAGCTAAATCAAAGTGGAGGTATTAAACAGCGTTTAACCGTTATTGAAACTTCTATTGGTTCAGATGATA
TTCCTTCGAGTATTAAAGGCCAAATCAAAGATAATACAACTTTAATCGAATCTCTAAATGGAATCGTCGG
TGAAAACACTTCATCTGGTTTAAGAGCGAATGTTTCATGGTTAAACAAAATTGTTGGAACTGATTCTAGC
GGTGGACAACCTTCTCCTTCTGGGTCTCTTTTAAACCGAGTTTCTACAATTGAAACTTCTGTTTCAGGAT
TGAATAACGATGTTCAAAACCTACAAGTAGAGATTGGTAATAATAGCGCAGGAATTAAAGGGCAAGTTGT
AGCGTTAAATACTTTAGTAAATGGAACTAATCCAAACGGTTCAACAGTCGAAGAACGCGGATTAACCAAT
TCAATAAAAGCTAACGAAACCAACATTGCATCAGTTACACAAGAAGTGAATACAGCTAAAGGTAATATAT
CTTCTTTACAAAGCGGTGTTCAAGCTCTCCAAGAAGCCGGTTATATTCCTGAAGCGCCAAGAGATGGGCA
AGCTTACGTTCGTAAAGACGGCGAATGGGTATTGCTTTCTACCTTTTTATCACCAGCATAACATGGGGCC
GCAAGGCCCCAAAGGATTTTAAATGTCAGGATATAATTCTCAGAATCCAAAGGAACTCAAAGATGTCATT
CTAAGACGTTTAGGGGCTCCAATTATTAATGTTGAGTTAACACCCGATCAAATTTACGATTGTATCCAGC
GTGCCCTAGAATTATACGGTGAATACCATTTTGATGGACTCAATAAAGGGTTTCATGTGTTTTACGTAGG
GGATGACGAAGAAAAGTACAAGACCGGAGTCTTCGATTTAAGAGGTTCTAACGTATTTGCAGTAACTCGC
ATTTTACGCACAAATATTGGGTCAATAACATCTATGGATGGAAACGCTACATATCCGTGGTTTACTGACT
TTCTTTTGGGAATGGCTGGTATTAATGGCGGAATGGGAACGTCTTGTAATAGATTTTATGGACCAAATGC
CTTTGGTGCCGATTTGGGGTATTTTACTCAACTTACCAGTTATATGGGAATGATGCAGGATATGCTCTCT
CCTATTCCAGACTTTTGGTTTAATTCAGCAAATGAACAGCTCAAAGTCATGGGAAACTTCCAAAAATATG
ATTTAATTATCGTAGAAAGCTGGACTAAATCATACATTGATACAAACAAAATGGTTGGAAATACAGTAGG
ATATGGAACAGTCGTTCCACAAGATAACTGGTCATTATCTGAACGATATAATAACCCAGACAACAATTTA
GTAGGTCGTGTTGTTGGTCAAGACCCAAATGTTAAGCAAGGTGCTTACAATAATCGTTGGGTGAAAGACT
ATGCAACAGCTTTAGCTAAAGAATTAAATGGTCAAATTTTAGCACGCCACCAGGGAATGATGCTTCCTGG
CGGTGTTACAATTGATGGACAACGCTTAATAGAAGAAGCTCGATTAGAAAAAGAAGCACTGCGCGAAGAA
TTATACTTACTTGACCCTCCATTTGGAATTTTGGTAGGTTAATATGGCTACTTACGATAAAAATCTTTTT
GCTAAATTGGAAAACCGCACAGGTTATTCTCAGACCAATGAAACTGAAATACTAAATCCTTATGTAAATT
TCAATCATTATAAAAACAGCCAAATATTAGCTGATGTATTAGTAGCTGAAAGCATTCAAATGCGAGGTGT
AGAATGCTATTATGTTCCAAGAGAGTATGTTTCCCCTGATTTGATATTCGGCGAAGACTTGAAAAATAAA
TTTACTAAAGCTTGGAAATTTGCTGCATATTTAAATTCATTTGAAGGATATGAAGGAGCTAAATCGTTCT
TTAGTAATTTTGGTATGCAAGTACAGGATGAAGTTACTTTGTCCATTAATCCAAACTTGTTTAAACACCA
AGTAAATGGAAAAGAACCGAAAGAAGGCGATTTGATATATTTTCCTATGGATAACAGCTTATTTGAAATT
AACTGGGTTGAACCATATGATCCATTTTATCAATTAGGCCAAAACGCTATTCGTAAAATTACGGCAGGTA
AATTCATTTATTCTGGAGAAGAAATTAATCCAGTTCTACAGAAAAATGAAGGAATTAACATTCCAGAATT
TAGTGAATTAGAATTAAATCCTGTTCGCAATCTTAACGGTATTCATGACATTAATATTGATCAGTATGCT
GAAGTAGATCAAATTAATTCTGAAGCTAAAGAATATGTTGAACCCTATGTTGTTGTCAATAACAGAGGCA
AATCTTTCGAATCTAGCCCATTTGATAATGATTTCATGGATTAATAAATATTATAAACTAATTAAAGCCC
AGATTAGGAGAAGTCATGTTTGGTTATTTTTATAATTCGTCTTTTAGACGATATGCTACCTTGATGGGCG
ATTTGTTTTCAAATATCCAAATCAAACGTCAGTTAGAATCTGGTGATAAGTTTATACGTGTTCCTATTAC
ATATGCATCAAAGGAACACTTTATGATGAAATTGAATAAATGGACATCAATAAATTCACAAGAAGATGTA
GCTAAAGTTGAAACCATTCTACCTCGTATAAATTTACATTTAGTTGATTTTAGCTATAATGCTCCATTTA
AAACAAACATTTTAAATCAGAATTTACTGCAAAAAGGTGCAACTTCTGTAGTATCGCAGTATAATCCATC
TCCTATTAAAATGATTTATGAATTGAGTATCTTTACTCGCTACGAAGATGATATGTTTCAAATAGTTGAA
CAGATTCTTCCATATTTTCAACCTCATTTTAATACAACTATGTACGAGCAGTTTGGAAATGATATTCCAT
TTAAAAGGGATATCAAAATTGTACTGATGTCTGCTGCTATAGACGAAGCTATAGATGGGGATAATTTATC
TCGTCGTAGAATTGAATGGTCATTAACATTTGAAGTAAATGGATGGATGTATCCTCCAGTAGATGATGCA
GAAGGATTAATTCGTACTACTTATACAGATTTTCACGCCAATACAAGAGATTTGCCTGATGGCGAAGGTG
TTTTTGAATCTGTCGATAGCGAAGTTGTTCCTCGAGATATTAACCCAGAAGACTGGGATGGAACAGTAAA
ACAAACTTTCACTAGTAATGTAAATAGACCAACACCGCCAGAACCTCCTGGCCCAAGAACATAGAGGTTA
TTATGGAAGGTCTTGATATAAACAAACTTTTAGATATTTCTGACCTCCCCGGAATTGACGGGGAGGAAAT
CAAAGTATATGAACCTCTGCAATTAGTAGAAGTTAAAAGCAATCCACAAAACCGTACTCCTGACTTAGAA
GATGATTATGGAGTAGTTCGTCGAAATATGCATTTTCAACAACAAATGCTAATGGACGCGGCCAAGATTT
TTCTTGAGACGGCAAAGAATGCTGATTCTCCTCGTCACATGGAAGTATTTGCAACTCTTATGGGGCAAAT
GACTACGACGAACAGAGAAATACTGAAGCTTCATAAAGATATGAAAGATATTACATCTGAGCAGGTTGGC
ACCAAAGGCGCTGTTCCTACAGGTCAAATGAATATTCAGAATGCGACAGTATTCATGGGTTCACCAACAG
AATTAATGGACGAAATTGGTGATGCTTACGAGGCTCAAGAAGCTCGTGAGAAGGTGATAAATGGAACAAC
CAATTAATGCATTAAATGATTTCCATCCGTTAAATGAAGCTGGAAAAATTTTAATAAAACACCCAAGCTT
AGCGGAAAGAAAAGATGAAGATGGAATTCATTGGATAAAATCTCAGTGGGATGGAAAATGGTATCCTGAA
AAATTCAGTGATTACCTTCGTCTACACAAAATAGTAAAAATTCCAAACAACTCTGATAAGCCTGAATTAT
TTCAAACTTATAAAGATAAGAATAATAAAAGATCTCGGTATATGGGTCTTCCTAACTTGAAACGAGCTAA
TATTAAAACACAATGGACTCGTGAAATGGTTGAGGAATGGAAAAAATGCCGAGACGATATTGTTTATTTT
GCAGAAACATACTGTGCTATTACTCATATTGACTATGGTGTCATAAAGGTTCAATTACGTGACTATCAGC
GTGATATGCTCAAAATAATGTCATCTAAACGTATGACTGTTTGTAATCTATCGCGTCAGCTCGGTAAAAC
AACGGTAGTAGCTATTTTCCTTGCACACTTTGTATGTTTTAACAAGGATAAAGCTGTAGGTATTCTTGCG
CACAAAGGCTCAATGTCTGCGGAAGTTTTAGACCGTACTAAGCAAGCAATTGAACTGCTTCCTGACTTTT
TACAGCCAGGTATAGTTGAATGGAATAAGGGTTCAATTGAACTAGATAATGGTTCTTCAATTGGCGCTTA
TGCTTCCTCTCCTGACGCAGTTCGTGGTAACTCGTTCGCAATGATTTACATTGACGAATGTGCGTTTATT
CCAAACTTCCATGATTCCTGGCTTGCTATTCAACCAGTAATTTCATCTGGTCGTCGTTCGAAAATTATTA
TTACTACGACTCCTAATGGATTAAATCATTTTTATGATATTTGGACTGCTGCTGTTGAAGGTAAATCTGG
ATTTGAACCATATACTGCTATTTGGAATTCAGTTAAAGAACGTCTTTATAACGATGAAGATATTTTTGAC
GATGGATGGCAATGGAGCATACAAACCATTAATGGTTCTACTTTAGCTCAATTTCGTCAAGAACACACCG
CAGCGTTTGAAGGGACTTCTGGTACATTAATTTCGGGAATGAAATTAGCTATTATGGATTTCATTGAAGT
AACTCCAGATGATCATGGTTTTCATCGATTTAAAAGCCCTGAACCAGATAGAAAATATATTGCAACTCTA
GACTGCTCAGAAGGTCGTGGGCAAGATTACCACGCTTTGCATATTATTGATGTTACCGATGATGTGTGGG
AACAGGTTGGTGTTTTGCACTCAAACACTATTTCTCATTTAATTCTACCTGACATCGTTATGCGTTATTT
AGTAGAATACAATGAATGCCCAGTTTATATTGAATTAAATAGTACTGGTGTGTCAGTTGCAAAATCGCTT
TATATGGATTTAGAATACGAAGGTGTTATCTGTGATTCATATACTGATTTAGGAATGAAACAAACTAAAC
GCACGAAAGCAGTAGGATGTTCCACGCTAAAAGACCTTATTGAAAAAGATAAGCTTATTATTCATCACCG
AGCGACTATTCAAGAATTTAGAACGTTTAGTGAAAAAGGCGTGTCTTGGGCGGCTGAAGAAGGTTATCAC
GACGATTTAGTAATGTCTTTAGTAATTTTTGGATGGTTATCAACACAATCAAAATTTATTGATTATGCGG
ATAAAGATGACACGCGATTAGCATCTGAAGTATTTTCAAAAGAGCTTCAAGATATGAGCGACGACTACGC
GCCAGTTATATTTGTGGATTCGGTTCATTCTGCTGAGTATGTTCCAGTATCTCATGGTATGTCAATGGTA
TAAATATATTAAAGCATATTAAAGAGGATTAAAAATGACTTTATTATCTCCGGGCATTGAGCTCAAAGAA
ACTACGGTTCAAAGCACCGTGGTTAATAACTCTACTGGTACAGCAGCTTTGGCCGGTAAATTCCAGTGGG
GTCCTGCTTTTCAGATTAAACAGGTTACAAATGAAGTAGATTTAGTTAATACTTTTGGTCAACCAACCGC
TGAAACTGCTGACTATTTTATGTCTGCGATGAATTTCTTGCAGTACGGAAATGACTTACGAGTAGTTCGT
GCTGTTGATAGAGATACCGCTAAAAACTCATCACCAATCGCTGGTAATATTGAATACACAATTTCTACCC
CAGGTAGTAACTATGCGGTTGGAGATAAAATCACAGTCAAATATGTTTCAGATGATATTGAAACTGAAGG
TAAAATTACTGAAGTAGACGCAGATGGAAAAATTAAGAAAATTAATATTCCTACTGCAAAAATTATCGCT
AAAGCGAAAGAAGTCGGTGAATATCCAACACTAGGTTCTAACTGGACTGCGGAAATTTCTTCATCTTCCT
CTGGTTTAGCTGCAGTAATAACTCTTGGAAAAATTATTACTGATTCTGGTATTTTATTAGCTGAAATTGA
AAATGCTGAAGCTGCTATGACAGCGGTTGACTTTCAAGCAAATCTTAAAAAATATGGAATTCCAGGAGTA
GTAGCGCTTTATCCAGGCGAATTAGGCGATAAAATTGAAATTGAAATCGTATCTAAAGCTGACTATGCAA
AAGGAGCTTCTGCATTACTCCCAATTTATCCAGGTGGTGGTACTCGTGCATCTACTGCCAAAGCAGTGTT
TGGATATGGACCGCAAACTGATTCACAATACGCTATTATAGTTCGTCGCAATGATGCTATTGTTCAAAGC
GTTGTTCTTTCAACTAAGCGTGGTGAAAAAGATATTTACGATAGTAACATCTATATCGATGACTTTTTCG
CAAAAGGCGGCTCAGAATATATTTTTGCAACTGCACAAAACTGGCCAGAAGGCTTCTCTGGAATTTTAAC
TCTGTCTGGTGGATTATCATCAAATGCTGAAGTAACAGCAGGAGATTTGATGGAAGCTTGGGACTTCTTT
GCTGACCGTGAATCCGTTGATGTTCAACTGTTTATTGCGGGTTCTTGTGCCGGTGAATCTTTAGAAACAG
CATCTACTGTCCAAAAACACGTCGTTTCAATTGGGGATGCTCGCCAAGATTGCTTAGTATTGTGCTCTCC
TCCGCGTGAAACTGTAGTTGGAATTCCTGTAACTCGTGCAGTAGATAATTTAGTTAACTGGAGAACTGCG
GCAGGTTCATACACTGATAATAACTTTAATATCAGTTCAACCTACGCAGCAATTGATGGTAACTATAAGT
ATCAGTATGACAAATATAATGATGTGAATCGTTGGGTTCCATTAGCAGCTGATATTGCTGGTTTATGCGC
AAGAACTGATAACGTATCTCAGACTTGGATGTCTCCAGCTGGTTATAATCGTGGCCAGATTCTTAACGTT
ATTAAACTTGCTATTGAAACTCGCCAGGCTCAGCGCGACCGTTTATACCAAGAAGCTATCAACCCAGTAA
CTGGTACAGGTGGCGATGGTTACGTATTGTATGGTGATAAAACAGCTACTTCTGTTCCTTCTCCATTTGA
TCGTATTAACGTTCGTCGTCTGTTTAATATGTTGAAAACGAATATCGGACGTAGTTCAAAATATCGTTTG
TTCGAATTAAACAACGCGTTTACTCGTTCATCATTCCGCACAGAAACTGCCCAGTACTTGCAGGGAATTA
AAGCTCTCGGTGGAATTTATGAATATCGTGTAGTTTGCGATACAACAAATAACACTCCGTCAGTAATTGA
TAGAAATGAGTTTGTTGCAACATTCTACATCCAACCTGCGCGCAGTATAAATTATATTACTTTGAATTTC
GTCGCAACGGCTACTGGTGCAGATTTCGATGAGTTAACTGGTCTTGCAGGTTAATACGGTGCATTCTAAA
GGCCTGTTTCGGCAGGCCATATAAATACACTATATCCTTAATTCTTTAATTCTATATGCCCTAGGTTAAA
CATAGGGATATAAATACTACAGAGGCTAATATGTTTGTAGATGATGTAACACGCGCGTTTGAATCAGGTG
ATTTTGCGCGACCTAACTTATTCCAAGTAGAAATTTCTTATCTTGGACAAAATTTTACGTTTCAATGTAA
AGCCACTGCTTTACCAGCTGGTATTGTAGAAAAAATTCCAGTCGGATTTATGAACCGTAAAATTAACGTA
GCAGGCGATCGTACATTCGATGACTGGACTGTTACAGTAATGAACGATGAAGCTCATGATGCTCGCCAGA
AGTTCGTTGATTGGCAAAGCATTGCTGCGGGGCAAGGAAACGAAATTACTGGTGGAAAACCTGCAGAGTA
TAAAAAGAGCGCTATCGTTCGTCAATATGCTCGTGACGCTAAAACAGTAACAAAAGAAATTGAAATTAAA
GGTCTGTGGCCTACTAACGTGGGTGAACTTCAATTAGATTGGGATTCAAACAATGAAATCCAAACATTTG
AAGTAACTCTTGCTCTCGATTATTGGGAATAAAATGAATGGGGAGAAATCCCCATCCTGCTTAAAGCAGA
GAAGTCCATTATAAATATAACTATAATTCCCATTTGGAGAATACAATGAAATTTAATGTATTAAGTTTGT
TTGCTCCATGGGCTAAAATGGACGAACGAAATTTTAAAGACCAAGAAAAAGAAGATCTTGTTTCCATTAC
AGCCCCAAAGCTTGATGATGGAGCGAGAGAATTTGAAGTAAGCTCGAATGAAGCTGCTTCTCCTTATAAT
GCTGCATTCCAAACAATTTTTGGTTCATATGAACCAGGAATGAAAACTACTCGTGAGCTTATTGATACAT
ATCGTAATCTCATGAATAACTATGAAGTGGACAATGCAGTTTCAGAAATCGTTTCAGACGCTATCGTCTA
TGAAGATGATACTGAAGTTGTAGCGTTAAATTTGGATAAATCTAAATTTAGTCCAAAAATTAAAAATATG
ATGTTAGATGAATTTAGTGATATATTAAATCATCTATCGTTTCAACGAAAAGGTTCTAATCATTTTAGAC
GTTGGTATGTTGATTCAAGAATTTTCTTTCATAAAATCATTGATCCAAAACGTCCAAAAGAAGGCATAAA
AGAATTACGTAGATTAGACCCTCGCCGAGTTCAGTATGTTCGTGAAATTATAACAGAAACTGAAGCTGGC
ACAAAAATAGTTAAAGGTTACAAAGAATATTTTATATATGATACTGCCCATGAGTCATATGCATGTGATG
GTAGAATGTATGAAGCTGGCACAAAAATAAAAATTCCTAAAGCTGCCGTCGTTTATGCCCATTCTGGATT
AGTTGATTGTTGCGGTAAAAATATCATCGGGTATTTGCATCGTGCTGTTAAACCTGCTAACCAATTAAAA
TTATTAGAAGATGCTGTAGTCATTTATCGCATTACTCGTGCTCCTGACCGTCGTGTTTGGTATGTAGACA
CAGGTAATATGCCTGCTCGTAAAGCTGCTGAGCACATGCAACATGTTATGAACACGATGAAAAACCGTGT
AGTATATGATGCATCAACAGGTAAAATAAAAAATCAACAGCATAATATGTCTATGACCGAAGACTATTGG
TTGCAGCGCCGTGATGGTAAAGCTGTGACAGAAGTTGATACTCTTCCTGGTGCTGATAATACTGGCAATA
TGGAAGATATTCGTTGGTTTAGACAAGCTCTTTATATGGCATTACGTGTTCCTCTTTCACGCATTCCGCA
AGACCAACAAGGCGGTGTGATGTTTGATTCTGGAACTAGCATTACACGTGATGAATTAACGTTTGCTAAA
TTTATTCGTGAGTTGCAGCACAAGTTTGAAGAAGTTTTCCTAGATCCGCTTAAAACAAATCTTTTGCTTA
AAGGTATAATTACAGAAGATGAGTGGAATGATGAAATAAATAATATTAAGATAGAATTTCATCGGGATAG
CTACTTTGCTGAGCTCAAAGAAGCAGAAATTTTGGAACGAAGAATTAATATGCTAACCATGGCAGAACCA
TTTATTGGTAAATATATTTCTCACAGAACTGCTATGAAAGATATTTTGCAGATGACTGATGAAGAAATAG
AACAAGAAGCCAAGCAAATTGAAGAAGAGTCTAAAGAGGCTCGTTTCCAAGACCCCGACCAAGAACAAGA
GGATTTTTAATGGAAGGTTTAATTGAAGCTATTAAATCAAACGACCTCGTAGCCGCTCGTAAATTATTTG
CTGAAGCCATGGCTGCAAGAACGATTGATTTAATTAAAGAAGAAAAAATCGCTATCGCTCGTAATTTCTT
AATCGAAGGTGAAGAACCTGAAGACGAGGATGAAGATGAAGATGATGACGAAGATAGCGATGATAAAGAC
GAAGACTCTGACGAAGACGAGGATGATGAATAATGCTTCTGATCCCTGAAACTCATGAATTAGTTCTCGA
AAGTGTCGAAGCACTTATTACTGAAGCACAGGGTCGCTTTGACGAATTGTCTTCTGCTTTAAATAAAGAC
GATATAAATACAATTGTCGAGAATATGCTTGATGATGAAACTGATTTAGCGGTTGCATTAGCTTCTATTA
ATGAAAATATGCCGTTAAATGAATTTATCGTTAAACATGTTTCCGCCCGTGGTGAAATTACTCGCACTAA
AGATCGCAAAACCCGCGAACGAAATGCATTTCAAACCACTGGGCTGTCTAAAGCAAAACGTAGACAAATT
GCTCGTAAAGCTACCAAAACGAAGATTGCCAATCCAGCAGGTCAATCTCGTGCTCAGCGTAAGCGTAAAA
AAGCTCTTAAACGCCGTAAAGCATTAGGATTAAGCTAATGAATGAACCCCAATTACTAATTGAAACTTGG
GGTCAACCTGGCGAAATTATTGATGGCGTGCCAATGCTTGAATCTCATGATGGAAAAGACTTAGGTTTAA
AACCGGGTTTATACATCGAAGGAATATTCATGCAAGCGGAAGTCGTCAATAGAAATAAACGTCTTTATCC
AAAACGTATATTAGAAAAAGCGGTAAAAGACTATATTAATGAGCAAGTTTTAACTAAACAAGCTCTCGGA
GAATTAAATCATCCTCCACGCGCTAATGTTGACCCGATGCAAGCCGCTATCATTATAGAAGATATGTGGT
GGAAAGGAAATGACGTATACGGACGAGCTCGTGTTATTGAAGGTGACCATGGTCCTGGAGATAAATTAGC
AGCTAATATTCGTGCCGGATGGATTCCAGGAGTTTCTTCTCGTGGATTAGGTTCATTGACTGACACAAAT
AAAGGTTATCGTATCGTAAACGAAGGATTCAAATTAACTGTAGGTGTTGATGCAGTATGGGGTCCAAGTG
CTCCAGATGCATGGGTAACTCCTAAGGAAATTACCGAATCACAGACGGCGGAAGCCGATACAAGTGCCGA
TGACGCCTATATGGCTCTCGCAGAGGCCATGAAAAAAGCGTTATAAATATTATTATCTAAACAACAGGAC
TACAAAATGCTTAAAGAACAACTGATTGCCGAAGCGCAGAAAATTGATGCTTCCGTTGCTCTTGATAGTA
TTTTCGAATCAGTTAATATTTCTCCGGAAGCAAAAGAAACTTTCGGCACTGTATTCGAAGCTACCGTCAA
GCAGCACGCCGTTAAATTAGCTGAATCTCATATCGCTAAAATTGCTGAAAAAGCAGAAGAAGAAGTAGAA
AAAAATAAAGAAGAAGCCGAAGAAAAAGCTGAGAAGAAAATCGCTGAGCAAGCTTCTAAATTCATTGACC
ATCTTGCAAAAGAATGGCTCGCTGAAAATAAATTAGCAGTTGATAAAGGCATCAAAGCCGAACTGTTTGA
ATCCATGCTTGGTGGATTAAAAGAGCTCTTTGTTGAACACAACGTTGTTGTTCCAGAAGAATCAGTTGAT
ATTGTAGCTGAAATGGAAGAAGAGCTGCAAGAACATAAAGAAGAATCAGCTCGTCTGTTCGAAGAACTCA
ATATGCGCGACGCATATATCAATTATGTGCAGCGTGAAGTGGCATTGAGCGAAAGTACTAAAGATCTGAC
TGAGTCTCAAAAAGAAAAAGTCTCTGCTCTGGTCGAAGGTATGGATTATTCAGATGCATTCTCAAGTAAA
TTGAGTGCCATCGTAGAAATGGTGAAGAAGTCTAATAAAGATGAAAGCACTATTACTGATGGTATAAATA
CTCCTGATACTGAAGCAGCCGGACTGAATTTCGTCACTGAAGCTGTAGAAGATAAAGCTGCACATGGTGC
AGAAGATATTGTAAGTGTATATGCGAAAGTCGCATCTCGTTTCTAATTTTAAAGGTTAACACAAATGACT
ATCAAAACTAAAGCTGAACTTTTGAACAAATGGAAGCCATTACTGGAAGGTGAAGGTTTACCGGAAATTG
CTAATAGCAAACAAGCGATTATCGCTAAAATCTTTGAAAACCAGGAAAAAGATTTCCAGACAGCTCCGGA
ATATAAAGACGAAAAAATTGCTCAGGCATTCGGTTCTTTCTTAACAGAAGCTGAAATCGGTGGTGACCAC
GGTTACAATGCTACCAACATCGCTGCAGGTCAGACTTCTGGCGCAGTAACTCAGATTGGCCCAGCTGTTA
TGGGTATGGTACGTCGTGCTATTCCTAACCTGATTGCTTTCGATATTTGTGGTGTTCAGCCGATGAACAG
CCCGACTGGCCAGGTATTCGCACTGCGCGCAGTATACGGTAAAGACCCGGTCGCTTCTGGTGCTAAAGAA
GCATTCCACCCAATGTATGGTCCAGATGCAATGTTCTCTGGTCAGGGTGCTGCTAAGAAATTCGCTGCTT
TGAAAGCAAGTGATACTCTTGAAGTCGGAACTATTTACACTCACTTCTTCCAGGAAACTGGTACTGTATA
TCTGCAAGCTACAGAAGTTAAACAAATCGATGTCGGTGCTAGTGATGCAGCTAAATTAGATGCTGAAATT
AAGAAACAAATGGAAGCTGGTGTACTGGTAGAAATCGCTGAAGGTATGGCTACTTCTATCGCTGAACTTC
AGGAAGGTTTCAATGGTTCTACCGATAACCCATGGAATGAAATGGGCTTCCGTATCGATAAGCAAGTTAT
CGAAGCTAAATCTCGCCAGCTGAAAGCTGCTTACTCTATTGAATTAGCACAAGACCTCCGCGCTGTTCAC
GGTATGGATGCTGATGCTGAACTGTCTGGTATTCTGGCTACAGAAATTATGCTGGAAATCAACCGTGAAG
TTGTTGATTGGATTAACTACTCAGCTCAGGTTGGTAAATCTGGTATGACCCTGACTCCAGGTTCTAAAGC
TGGTGTATTTGACTTCCAGGACCCAATCGATATTCGTGGTGCTCGCTGGGCGGGTGAATCCTTTAAAGCT
CTGTTGTTCCAGATTGACAAAGAAGCAGTTGAAATTGCTCGTCAGACCGGTCGTGGTGAAGGTAACTTCA
TTATCGCTTCCCGTAACGTAGTTAACGTTCTGGCTTCAGTTGATACCGGCATTTCTTATGCTGCACAGGG
TCTGGCTACCGGCTTCAACACTGATACTACCAAGTCAGTATTTGCTGGTGTTCTGGGTGGTAAATACCGC
GTATATATCGACCAGTATGCTAAACAGGATTATTTCACTGTAGGTTATAAAGGTCCGAACGAAATGGATG
CTGGTATTTACTATGCTCCATATGTAGCTCTGACTCCGCTGCGTGGTTCCGATCCGAAGAACTTCCAACC
GGTAATGGGATTCAAAACTCGTTACGGTATCGGTATCAACCCATTTGCAGAATCCGCTGCTCAGGCTCCG
GCTTCTCGCATCCAGAGCGGTATGCCTTCTATTCTGAATAGCCTTGGTAAAAACGCTTACTTTAGACGTG
TATATGTTAAAGGTATCTAATCTTTGACGATTTAAGGGACCTTCGGGTCCCTTTAGTTGTTTTTATGGTA
TAAATAAATCATATAAACCAAAAGGAAAGCGCAATGGCTAAAATCAACGAACTTCTGCGCGAATCAACCA
CAACGAATAGCAACTCAATCGGTCGCCCAAATCTCGTTGCTTTGACTCGCGCTACCACTAAATTAATATA
TTCTGACATTGTAGCAACGCAAAGAACTAATCAACCTGTTGCTGCTTTTTATGGTATCAAATACCTTAAC
CCAGACAACGAATTTACATTTAAAACTGGTGCTACTTATGCTGGCGAAGCTGGATATGTAGACCGAGAAC
AAATCACAGAATTAACAGAAGAGTCTAAATTAACTCTCAATAAAGGCGATTTATTCAAATATAATAATAT
CGTTTATAAAGTATTAGAAGATACACCATTTGCTGATATTGAAGAAAGCGACTTAGAGCTGGCTCTTCAG
ATTGCAATTGTTCTTTTAAAGGTTCGTCTATTTTCTGACGCAGCGTCAACAAGCAAATTTGAAAGCTCTG
ATAGTGAAATTGCGGATGCTAGATTCCAGATTAATAAATGGCAAACCGCGGTTAAATCTCGTAAACTTAA
AACTGGCATCACAGTTGAATTAGCGCAAGATTTAGAAGCAAATGGATTCGATGCTCCTAATTTCTTGGAA
GATTTGCTTGCAACTGAAATGGCAGATGAAATCAATAAAGATATTCTGCAATCTTTGATTACAGTGTCAA
AACGCTATAAAGTTACAGGAATTACTGATAGTGGATTCATCGATTTGAGTTATGCGTCTGCACCTGAAGC
TGGTCGTTCATTATACCGAATGGTATGTGAAATTGTTTCGCATATCCAAAAAGAATCAACTTATACAGCA
ACGTTCTGTGTTGCTTCTGCTCGTGCCGCTGCGATTCTTGCTGCATCAGGTTGGTTAAAACATAAACCAG
AAGATGACAAATATCTTTCACAAAATGCCTACGGGTTATTAGCTAATGGTTTACCGCTTTATTGCGATAC
TAACAGCCCATTAGATTATGTAATCGTTGGTGTAGTAGAAAATATCGGTGAAAAAGAAATTGTTGGATCA
ATTTTCTATGCTCCGTATACAGAAGGTCTCGACTTAGATGACCCTGAACATGTAGGCGCATTTAAAGTTG
TTGTTGATCCAGAAAGCTTACAACCGTCTATCAGTTTATTAGTTAGATATGCTTTATCAGCAAATCCTTA
TACCGTAGCAAAAGATGAAAAAGAAGCAAGAGTAATTGATGGTGGAGACATGGATAAAATGGCGGGTCGT
TCAGATTTGTCTGTTTTATTAGGTGTTAAATTACCAAAAATTATTATTGATGAATAAAACAAAGGGACCG
AAAGGTCCCTTTTTATTTAGCTCACCAACTCAATCCAAGCTGGACGAAGTACATCTTACCATTTTAACTA
ATTCCTTTTTAATCAAAGAAGGATTATCTGCTTGAGTTAGAGTAATACCTTCACGAGAAGTTTCTTCCAA
AATATCTTGAACAGTTAGCCCCATCACCTTTCCAAAATCCTTTGGACCAATTTCGCCAATTTTAGAAATA
ACGTTATTTACACGGTTCAGTGTAACGTAACAAGCTAAAATTCCCACCAATTTGTTATCAGCTTCTGATA
GTTCAACTTTAGCTTTAATAGGCTTATCAGACTTTTTCTTTTCACTAAATTTGGAATTCTTGCATTTAAT
TGCTACACGATTTCCATTATGAAGCCAAGAAGGATAACAAGGTTTCAATACATATCCTTCAGCAGTAAAT
ACTTCGCCTTTTGCTTCGGCATTCCAAACGCATTTATTTGCATCAACTAATCCAGCATGGTCTACTGTAA
AATTATAATCTTGGACGACAGAATCTAAATCATTTGGCAATTTAATAAGCTCTTCAAATTTACCGCGACC
TAAAAGTGGAGCAATTTTAAATTTAAATGTATTACAGAATGATTCCATCATATAATCATCAACATAAGTC
ACATCACCACTTTCTGTAGTGACAATAATGTCAAATACATAAAAATCTTTATCGCCATAATCAACATTCT
TCTGAATGCCAGGTCCAGCGAATTCGCCAAAGACTTGATAAGATACAACCGCTGAGGTTTCCATAATATC
TTGTACTGCTTTAATGGAATCAGCGTAATTCTTTAGAATAATTTCATACCCAAAGAAATCTTCAGCAGGA
AGAATCGGTCCAGTACGTTTAGCACAAGTTACTTTATCACGCTCAATAATCAATGAGAAATTTGTGCCGT
GAATCTTTTCACGAGCTACCCATTCGCCGCCAGTCAATCCCAAGCTGTAAAGTTTTTCAATAAATTTAGA
GTTGTAATGATTTTCAAGACTGCTACTTTTTAAACATAATTAATCCTCAAAATGTAATTTCTAACCAATC
ACCATCACGCTGATCACTATTGACTTTAAAATTAAATCCTTCTTTTCTCAGCCAATCACCAATTTCTTCA
GTAATCAATTTATCGCGAGCAGTATAATAACTAAAATATGTTTTACCTTGTTCAGCTGCTTTATTAGCAA
GTTCCGAAAAATCTTTAATAAAACACTCTAGCTTAAACTGTTTACTTTTTAATGCTTTTTCGCGTAATTG
ATTAGCAAAAGATTCATTTTCATAAAGTTCATACTGTTCCATTTTTCACCTTTTTATTGATATGTCTTTT
TCTATAGACAACTTTTTCTCGAGTTTCAAATTTATTCTTAGCAGTCATAGCTCGAGCCCATAATACAGCC
ACTTCTTTTGCATGTAAGTTTAATTCACGAGCAATTTCAATGAATGACTTTCCAGACTCATGAAGAGTAA
ACACCACAACCTCAGTTCTCATATTCAATCTCATGTTATCGAGTTGGTGCCATTATATACATCATTTTCT
GATTGTGTTTTGTGTGCTTTCAAAATGAAGAAAGGGGCCGAAGCCCCTTATGATTATGGATAGGTATAGA
TGATACCAGTTTCTAAAGCAGTTTTATGAATGATGTATCCATTACGCGATTCTTGGACATCAACTTCTGG
ATAGTCTTTCATCATCTTCTGAAGAGTGTAACGATGCAGGTAGTATTTACTCTGGATCTTCAGTTTTCCA
ATCTTTACCTTCTTCAGTCATTTTTTGGATTTCATCCATAACCCACCAACCGCACCAGATGTAAGCTGAA
GTACGATGTGGAAGAGGATGAACATAAGGTAATTCACCTTCTGGTTCTGGAGCAACTTTATCAGTTACCT
GAACTTGACCTGTTGTTTTAACTGTTTTGCTATCATAATCAGTAGCAGTAACGACGGCAGTCACTTCAAT
AGTTTGACTTCCAACAGATGAAGTATCAACGGTATATACATTAGTTGACCCTTCTACAGGAGAAGAATCT
TTCTTCCATGAATAAGTAATTTGCGCTTCTTCTGGAGCATCAGTAACATTAGCAGTAAATGTAGCCGAAG
CATCTTGTTGAACGTTAATAGAAGGAGGAGTCAATGTAACCTGTGGATTCATTGTCTTCTTATTAACCGT
TAATGACACTTCATTAGAAGTAACGCTTAGTGCATCATAATCTGTCGCGGTTACTTGAGCTACACACTTG
ATTTTTTAACTCCACTTGTAGTTGGAGTATAGCTAAATGTAGAGTTAGTTTCTCCACCAACTTGTGAATC
ATCTACATACCACTGATACGTAGCAGATGCTCCATCAGGTTGAGAAGCTAAGGCAGCAGTAAATTGAACT
GGGGTTCCGATTACTCCAGCGTCAGGGCTATTAGGAGTTACAGCTAAGGTGGTCGTTTGTGTCTTATTTT
GAACTGTGATAGTTGTAGTAGCTTCTGCTGTTTCAGCTTCAGCTTCTGGAATTGTATTTGTTGCAACTAC
TTTAATAGTCTTTTGACCGGCAGGTATAACTAAAAGTTGCTTCAGCTCCATCTTGTGGAACATTATCTAC
GCTCCAAGCATAGGTAATAGTTCCACCTTCAGTTTGACCACTGGGTGCAGCAGTAAACTGCTTGGTTTCA
TCAATAACCCCTGTCGGTGTTTTAGGAGTTATATCAACTGTAAAAGTCATAAGTTATCCTTATTTTAATG
TTACGAAAGAAGAATTGCGTGTTTCACGAATTAAAACTGATCCGTCGCGGTTAATGTAATAAATTAAGCT
AAATAAAGTTTGGTGTGCTGACGCATGTTCAAAACTAGTTGGGTGAGATTTCCAATCCGGAGTTTCAGCA
ATCCATTGATAAATCCACCAAGGAACAGTGCAGAATCCTGGATTTTTTCCAATCAGCTGAAGATTCGGAC
TAAAGTTTTCCGGAAGAGTAAATACAGACGGCTTTTCAGATTCAATAATCTCAGCTACAGCTTGTTCAAA
CTTTTCTTCAACAAAAGGAGTATCTTCAATCAAAACATCGGTATTTTCAGGAATTTTATCCGTTTCTACT
ACTTCAATTTTAATGTCAGATTTAACCGGAGAATCAATCAGAAGTGCTGCTTCTGGATTGACTTCTTCAT
CGTCATATTTTAATCCCTCTGCGGCATCAGCAGCATCAATTAAGTCTTTAATAGATAACCCATCAGTCTC
TGGCATAGGTTCACTAGCGAGCTTCTGGAGGGCTTCTTCAATATCAACAACGATATTATCAAAAGATTTA
TTCTTTTTGACCTTTATACCAAACTGTTCAGCATATTCAGCTAATTTAGCTTTAGCTTCTTTGTTATCAT
CAAGAGCCTTCAGCTCTGCAATATAATCTTTATCTATCATAATATTTCCTCAGTATAAATATAGATATAT
TTATTACATGGTATTTAGACATGACTGACATTAAAGTACATTTTTATGATTTTAGTCACGTGAGAATTGA
TTGTGAAGAAAGTACATTTCATGAACTCCGTGATTTCTTTAGCTTTGAAGCTGATGGGTATCGTTTTAAT
CCGAAATACAAATATGGCCACTGGGATGGACGAATCCGTCTTTTAGATTATAATCGTCTTCTTCCATTCG
GCTTAGTCGGGCAAATTAAAAAGTTCTGTGATAATTTTGGCTATAAAGCCTGGATTGACCCACAAATTAA
CGAAAAAGAAGAATTATCAAGAAAAGATTTTGATGAATGGCTTTCTAAATTAGAAATCTATTCAGGAAAT
AAAAGAATCGAACCACACTGGTATCAAAAAGATGCAGTGTTCGAAGGATTAGTTAATCGTCGTAGAATTC
TTAATCTTCCAACATCTGCAGGTAAATCTTTAATTCAAGCTTTGCTTGCGCGATATTATTTGGAAAATTA
TGAAGGTAAAATTCTTATCATTGTTCCAACAACTGCTTTAACAACTCAGATGGCTGATGACTTTGTTGAC
TATCGTTTATTCAGTCATGCAATGATAAAGAAAATTGGTGGCGGAGCATCAAAAGATGATAAATATAAAA
ATGATGCACCAGTCGTTGTTGGTACATGGCAAACTGTAGTTAAACAACCGAAAGAATGGTTCTCACAGTT
TGGAATGATGATGAATGATGAATGCCATCTTGCTACAGGAAAAAGTATTTCATCTATCATATCAGGTTTA
AATAACTGCATGTTCAAATTCGGTTTGTCTGGTTCATTACGTGATGGCAAAGCTAATATCATGCAGTATG
TTGGAATGTTTGGTGAAATATTTAAGCCAGTAACGACTTCTAAATTAATGGAAGATGGACAAGTAACTGA
GCTAAAAATTAATAGTATTTTTCTTCGCTATCCAGATGAGTTCACTACTAAATTAAAGGGAAAAACTTAC
CAAGAAGAAATAAAAATTATTACTGGGCTCAGTAAAAGAAATAAATGGATCGCTAAATTAGCTATTAAGC
TTGCGCAAAAAGATGAAAACGCTTTTGTCATGTTTAAACATGTATCGCATGGTAAAGCTATTTTCGATTT
AATTAAAAATGAATACGATAAAGTTTATTACGTATCAGGGGAAGTTGATACCGAAACCCGCAATATAATG
AAAACCTTAGCTGAAAATGGTAAAGGAATAATTATAGTAGCTAGTTATGGTGTATTTTCTACTGGTATTT
CAGTTAAAAATCTGCATCACGTTGTTTTAGCGCACGGTGTTAAATCAAAAATCATTGTATTACAAACAAT
CGGTCGTGTATTACGTAAGCATGGTTCTAAGACAATAGCAACCGTCTGGGACCTCATAGATGATTGTGGT
GTTAAGCCAAAATCTGCTAATACGAAAAAGAAATATGTTCATTTGAACTATCTTTTAAAACACGGCATTG
ATCGTATTCAGCGCTACGCAGATGAAAAATTTAATTACGTAATGAAAACAGTTAATTTATAAGGGCTTCG
GCCCTTTGGAGAAAAAGATGTTACTAGGATTTAAACAATTTCTTTATGAAGCTTCTATTGATGAATTTAT
GGGTAAAATTGCCTCTTGTCAAACATTAGAAGGTTTAGAAGAACTTGAAGCTTATTATAAGAAAAGAGTC
AAAGAAACTGAATTAAAAGATACTGATGACATCTCTGTAAGAGATGCTTTGGCAGGAAAAAGAGCTGAAT
TAGAAGATTCAGACGATGAAGTAGAAGAAAGCTTTTAAATTAAAAAAGGCCCAACCAAAAAGGAAGGGCC
AAAACTATAGACTAAAGGTCACACTATAGCAAAAGTTGTGTTTCATTTAATTGTTCTTCCGAACTTTCTG
AAACTGGTAGTTCTTTAATGTAATTATAGCAAGGCCCAGGATGTACAGGACCTTTGTCTGTTTCAACAAC
CAATGCAGAATCGATTGGAGTTTTACAGACAACACAAATCTTATCTGACATGATTGTCTCCTCTGAATTA
TATCTATTTATACAACTCTCATATGCATATCAATGCCCATATCTTTAGAATAAAAATATTCATCAAGATA
TCCGGCAAATTTTCCTTTAATATAAAGGACATCTTCACCACACGGGTGATCGGCCAGGATACGAATATCC
TGACGCTTAAGATTATGCTTTTTCATTAAGAATTGAATCTCAGTTTCAAATTCTTCTTCATAATTAAAAG
CATCATCAATGCTATATCTCATTATTTTCCAGCCTCAAATGCCCGCATGTCTTGAATATGCTTAATAGCA
AATCCGCGTGATTTGATAGCATCAAGAGCTCCGCTACAGAAATCTAATAAAATCCCCCAATACTGTAACG
AGGTATCAACCTTTAAAACATCCTTATCCGCTGATAGAACTGTCTTCATTTCTGATTTCTCGTAACGATC
CATACTAAATTCATCACCATCTCCTCGTCCCGAGTAGTAGTCTAATTTAGCTTTAAGAGCAACTTTTTTC
TGTGCGTCAATTCTAAGCATTTCCTTTTTAATACTTGAATGCTTATTAAGCCATTTACTGTATAACATCA
CATTATTAGCTGCTTCATACTGTAATTTAGTTGAATCTATAAACACATCTTTCTTCAATTCTTCTTGAAG
ATCTTCTAATCTCATATTGTTCTCTATTCAATTGTTATTGGATGGACTTAGATTCATTATACCACGTTTT
AACGTGAAGCATTATACCCTATTACTCGAAGCCAGTTGCAGTTTTATCTGCTCAATATCATCAGGGTTAT
CGATGACCGAAAAGCGTATTTCTACTATCAGAGTATAATCATCATAAACTGGTATCACATTAACTGATAA
TTTATCAATACGTGGCTCATAGTTTCTTACTGCGCTTTCGATATTGCGCTCAACCGTGTCAGCAGTAAGA
GGAGTCATATTTTCAAAAAGCTGATCTGATAAATCACATCCAAATTCAGGGTCAAACGGTCTTGAACCTT
TTCTTGTTGTAATAATTCCCAAAAGACTGTTTTTAATTGACCTTAATCCAAGTGATCTGGAAACATCTTT
GTTCCAATCCATTTTCATTTCCGGGTCAATGTCAGAATAAAGCTTATTAATATTTGCCATTATAGTAACT
CAAAGAACTCTTTGAGGCCTCTTATTACATGAGCATGGGTTTTTCCACACTCTGGACATTTAATTGGAAC
AGCCAAATAAACGGTAGGCTTTAAAAGCATATCTTTTATAGCTACAATATCTGACTCTGTGATGATAGAA
TATAAATCTTCTAGTTCTTTTTCATTTAAGTCTTCAACTGGAATGCTTTCACCGTTAGCATGAATCGTTT
CTATGCATGATACTATCATGTGGGCTATATTTTTATCATCAAAAATTTTAGGGTATCGGAATTTAATTTT
AATGTCACCCAGTGTATACCAGAGGTCTTCTGGTGCATCTATTTGTGTATGTAATAGATTTATATGGGTT
GGTATTTCAGTTCCACAGGTGCACTTCCAGGAGTTTTCGTGATTAACTTCTCCAAGAGAATGCGCCCATA
AATGAATCAGCAATAGTTCTGATTCTTGGCGGTTTAAATCTTTTGCATTTGTGCAGTCTTTGATTAGCTT
TTTAACAATTACTTCTACGGAACCATTATTTTTGGCAGTAATAAGTTCTAGATATTCTTTAAGCGTGAAT
GCGCGACAATTGATTATTTTAGAACCAACTCTCACATCAAATTTGTATTCATACATATTTAGCTCCTTTA
TTTATCATATTTATAAATAGAATAAAAGGAGCATCTATGGCAAACATTATTCGTTGTAAATTACCAGATG
GTGTTCATCGTTTTAAACCATTTACGGTAGAAGATTATCGAGATTTTTTGTTAGTTCGAAACGATATAGA
ACATCGGTCACCACAAGAACAAAAAGAAATAATTACTGATTTAATTGATGATTATTTTGGAGACTATCCG
AAGACTTGGCAACCATTTATATTTTTGCAGGTATTTGTAGGGTCAATAGGTAAAACTAAAGTACCGGTCA
CATTTGTATGTCCAAAATGTAAAAAAGAAAAGACAGTTCCATTTGAAATATATCAAAAAGAATTAAAGGA
ACCTGTTTTTGATGTAGCTAATGTTAAAATTAAATTAAAGTTTCCTTCTGAGTTTTATGAAAATAAAGCA
AAGATGATTACTGAAAATATTCATTCTGTTCAAGTAGATGAAATATGGTATGATTGGAAGGAAATTAGTG
AATCAAGCCAAATAGAACTTGTTGATGCCATCGAGATAGAAACATTAGAAAAAATTCTCGATGCAATGAA
TCCTATTAATTTAACTCTACATATGTCATGCTGTAATAAGTACATTAAAAAATACACTGATATAGTAGAC
GTGTTTAAGCTGTTAGTTAACCCAGATGAGATATTTACTTTTTATCAAATTAATCACACACTCGTAAAAA
GTAATTATAGCTTAAATTCAATAATGAAAATGATTCCTGCCGAGCGCGGATTCGTATTAAAACTGATTGA
GAAGGATAAACAATAATGAGTATGTTGCAACGCCCCGGATATCCAAATCTCAGCGTTAAATTATTTGATA
GCTACGACGCTTGGAGTAATAATAGATTTGTTGAATTAGCTGCTACTATTACCACATTAACTATGCGGGA
TTCTCTTTATGGACGAAATGAAGGAATGCTGCAGTTTTATGATTCTAAAAACATCCATACAAAAATGGAT
GGAAATGAAATAATTCAGATTTCTGTAGCTAATGCAAATGATATTAATAATGTTAAAACACGAATTTATG
GATGTAAGCATTTTTCCGTGTCAGTAGATTCAAAAGGTGATAACATCATTGCTATTGAATTGGGAACTAT
TCATTCTATAGAAAATCTTAAATTTGGTAGACAATTTTTCCCTGATGCAGGTGAATCTATAAAAGAAATG
CTTGGTGTCATTTATCAGGATCGCACATTATTAACTCCAGCAATAAATGCTATAAATGCTTATGTTCCTG
ATATTCCATGGACTAGCACATTTGAAAACTATTTGTCATATGTAAGAGAAGTTGCTCTAGCTGTAGGAAG
CGACAAATTTGTATTTGTATGGCAAGACATCATGGGAGTTAACATGATGGACTATGATATGATGATAAAT
CAAGAACCATATCCAATGATTGTCGGTGAGCCATCTTTAATAGGTCAATTCATCCAAGAATTAAAATATC
CATTAGCATATGATTTCGTTTGGTTGACTAAATCGAATCCTTACAAACGTGATCCAATGAAAAATGCTAC
TATCTATGCTCATTCATTTTTAGATTCTTCACTGCCAATGATTACTACAGGAAAGGGTGAAAACTCTATT
GTAGTGTCAAGATCAGGTGCTTATTCTGAAATGACTTATAGGAATGGATATGAAGAAGCTATTCGTCTTC
AAACTATGGCACAATATGACGGTTATGCTAAATGTTCTACTGTCGGTAATTTTAACTTGACTCCTGGTGT
TAAAATTATTTTTAATGATAGTAAAAACCAATTTAAAACAGAATTTTACGTTGATGAAGTTATCCATGAA
TTATCCAATAATAATTCAGTAACTCATCTATATATGTTCACTAATGCAACGAAACTGGAAACAATAGACC
CAGTTAAGGTTAAAAATGAATTTAAATCTGATACTACCACTGAAGAAAGTAGTTCTTCCAATAAGCAATA
AAGAAGTTTCTATTCCTAAAATGGGTCTTAAACATTATAACATTTTAAAGGATGTTAAAGGTCCTGATGA
AAATTTAAAACTTCTTATTGATTCTATTTGTCCGAATTTATCACCGGCAGAAGTTGATTTCGTTTCTATT
CATTTATTGGAATTTAATGGAAAGATTAAATCTCGTAAAGAAATAGATGGCTATACTTATGACATTAATG
ATGTTTATGTATGCCAAAGATTAGAATTTCAATACCAAGGAAATACATTTTATTTTAGACCTCCTGGAAA
ATTTGAACAATTTTTAACGGTGAGCGATATGTTATCTAAATGCTTGCTTAAGGTCAACGATGAAGTTAAA
GAAATTAATTTTCTTGAGATGCCAGCATTCGTTTTAAAATGGGCAAATGATATTTTTACAACTTTAGCAA
TTCCTGGCCCTAATGGTCCAATAACCGGAATTGGCAATATTATTGGATTATTTGAATGAAAAAGCCACAA
GAAATGCAAACGATGCGTAGAAAAGTTATTTCAGATAATAAACCAACACAGGAAGCGGCTAAATCCGCTT
CTAACACTTTATCTGGACTTAATGATATATCTACGAAATTGGATGATGCTCAAGCTGCTTCTGAATTAAT
AGCTCAAACTGTCGAAGAAAAATCGAATGAAATAGTTGGAGCAATTGGTAACGTAGAAAACGCAGTGAGT
GATACTACTGCCGGTTCTGAGTTAATTGCTGAAACTGTCGAAATTGGCAACAATATTAATAAAGAAATCG
GTGAATCACTCGGAAGCAAATTAGATAAATTAACAAGTTTACTAGAGCAAAAAATTCAGACAGCTGGAAT
TCAACAGACTGGAACTAGTTTAGCCACAGTTGAAAGCGCTATTCCTGTTAAAGTCGTTGAGGATGATACT
GCTGAATCTGTGGGTCCTTTATTACCGGCTCCCGAAGCAGTTAATAATGATCCTGACGCTGATTTTTTCC
CTACCCCTCAGCCAGTTGAACCCAAACAAGAATCGCCAGAAGAAAAACAGAAAAAAGAAGCATTTAACTT
AAAATTATCTCAAGCTTTAGATAAATTAACAAAGACTGTTGATTTTGGATTTAAGAAATCCATTTCAATT
AGTGATAAAATATCAAGCATGTTATTTAAGTACACCATCAGTGCTGCTATTGAAGCTGCTAAAATGACTG
CAATGATATTGGCTGTTGTTGTTGGAATAGACCTGTTGATGGTTCACTTTAAATATTGGTCAGATAAATT
TTCAAAAGCCTGGGATTTATTTAATACTGACTTTACTAAATTCTCTAGCGAAACCGGAACTTGGGGTCCT
TTATTACAGAGCATCTTTGATTCTATTGATAAAATTAAACAACTTTGGGAAGCGGGAGATTGGGGTGGAT
TGACAGTAGCTATTGTTGAAGGGCTTGGAAAGGTTCTTTATAATTTAGGAGAACTTATTCAGCTTGGAAT
GGCTAAATTATCTGCGGCAATTCTTCGAGTCATTCCTGGCATGAAGGATACTGCTGATGAAGTAGAAGGA
AGAGCACTAGAAAATTTCCAAAATTCTACTGGAGCATCTCTCAATAAAGAAGACCAAGAAAAAGTAGCAA
ATTATCAAGATAAACGAATGAATGGAGACCTTGGCCCAATAGCAGAAGGACTAGACAAAATCTCTAACTG
GAAAACTCGTGCATCTAACTGGATTCGTGGTGTAGATAATAAAGAAGCACTGACTACTGACGAAGAACGT
GCAGCAGAAGAAGAAAAATTAAAGCAGCTTTCACCTGAAGAAAGAAAAAATGCTTTAATGAAGGCCAATG
AAGCTCGTGCCGCGATGATTCGTTTTGAAAAATATGCTGATTCAGCTGATATGAGTAAAGACTCAACGGT
TAAATCAGTTGAAGCTGCCTATGAAGACCTTAAACAGCGGATGGATGACCCGGATTTAAATAATTCGCCG
GCAGTTAAAAAAGAACTTGCTTCTAGATTTGCTAAAATTGATGCTACTTATCAAGAGCTCAAGAAAAATC
AGCCTAATGCCAAACCTGAAACTTCTGCTAAATCACCAGAAGCGAAACAGGTCCAGGTTATTGAAAAGAA
CAAAGCACAACAAGCTCCTGTTCAACAAGCATCTCCTTCAATCAATAATACTAATAATGTTATTAAGAAA
AATACTGTCGTTCATAATATGACACCTGTTACGAGCACAACTGCTCCTGGTGTATTTGGCGCGACTGGAG
TTAATTAAGGAATAATATGGCAATTGTTAAAGAAATAACTGCTGATTTAATTAAAAAGTCCGGTGAGACA
ATTTCAGCCGGACAGAGCACTAAATCAGAAGTAGGAATTAAAACATACACAGCCCAGTTTCCAACTGGGC
GTGCTAGTGGTAATGACACTACAGGGGACTTCCAGGTAACAGATCTATATAAGAATGGATTATTATTTAC
TGCATACAATATGTCATCTAGGGATTCTGGAAGTCTTAGATCGATGAGATCTAACTACTCTTCTTCATCT
TCGAGTATTTTACGTACAGCCAGAAACACTATTAGTAGTACAGTATCAAAACTATCAAATGGATTAATAT
CAAATAATAATTCAGGAACAATAAGTAAAGCTCCTGTCGCAAACATTCTTTTACCGAGATCTAAATCTGA
TGTTGATACATCATCACATAGATTTAATGATGTTCAAGAAAGCCTTATCAGTAGAGGCGGAGGTACTGCT
ACTGGAGTGCTAAGTAATATTGCTTCAACCGCAGTATTTGGGGCGTTGGAAAGTATAACACAAGGTATAA
TGGCTGATAATAATGAACAGATTTATACGACAGCCAGAAGTATGTATGGTGGTGCTGAAAATAGAACTAA
AGTGTTTACATGGGATTTAACTCCACGTTCAACAGAAGATTTAATGGCTATTATTAATATCTATCAATAT
TTTAACTATTTTTCTTATGGTGAAACGGGTAAATCTCAATATGCTGCTGAAATAAAGGGGTATTTAGATG
ATTGGTATCGTTCTACGTTAATTGAACCTTTATCTCCGGAAGACGCAGCTAAAAATAAAACACTATTTGA
GAAAATGACATCGAGTTTAACTAACGTTCTAGTAGTTTCAAACCCGACGGTTTGGATGGTGAAAAACTTT
GGTGCAACATCTAAGTTTGATGGAAAAACGGAAATATTTGGTCCATGCCAAATACAGAGCATCAGATTTG
ATAAAACACCTAACGGTAACTTTAACGGATTAGCTATTGCTCCAAATCTCCCTAGTACATTTACTCTCGA
GATTACTATGAGAGAAATTATCACGTTAAACCGTGCTTCTTTATATGCGGGGACTTTTTAATGTATTCTT
TAGAGGAATTTAATAATCAAGCAATAAACGCAGATTTCCAACGTAATAATATGTTTAGCTGCGTTTTTGC
AACAACTCCATCAACTAAAAGCTCTTCGTTGATAAGTTCAATTAGCAACTTTTCTTATAATAACTTGGGC
CTAAATTCAGATTGGTTAGGATTAACTCAAGGTGATATTAATCAGGGAATTACAACGCTAATTACAGCTG
GCACACAAAAACTAATAAGAAAATCGGGGGTTAGTAAATATCTTATTGGTGCCATGAGTCAACGTACAGT
TCAAAGTTTATTAGGCTCATTTACAGTTGGTACATATTTAATTGACTTCTTTAACATGGCATATAACTCA
TCTGGATTGATGATATACTCTGTAAAAATGCCAGAGAATAGATTATCCTATGAAACTGATTGGAACTACA
ACTCTCCTAATATTCGTATAACTGGGAGAGAATTAGACCCTTTGGTTATTTCATTTAGAATGGATTCAGA
ATCGTGTAATTACCGTGCAATGCAAGACTGGGTTAATGCTGTTCAAGACCCAGTAACTGGATTACGTGCT
CTGCCACAAGATGTCGAGGCAGATATCCAGGTTAATCTTCATTCTCGTAATGGATTGCCTCATACTGCGG
TGATGTTCACCGGATGTATTCCAGTGTCAGTGAGCGCTCCTGAGTTATCATATGATGGAGATAACCAAAT
AACTACATTTGATGTTACTTTTGCGTATAGAGTCATGCAGGCTGGAGCAGTTGATAGGCAAGCTGCGCTT
GAATGGCTTGAATCTGCTGCTATAAATGGTATTCAAAGCTCTTCTGGAAATAATGGAGGTGTTACTGAAC
TATCTAGTTCGCTTTCACGACTTAGTAGATTAGGAGGAACTGCAGGAAGCATTTCAAACATTAATACTAT
GACAGGGATTGTCAATTCGCAGAGTAAAATATTAGGAGCAATATAACAATGGGGACCTTTCGGTCCCCAT
ATTTTTATTTACGGAATGAAATGAAAGCAGAAACTGAAGCAACTAAACTGTCTTCAATATAAACTTCAAT
TTTTACCGGAGCTTCTGACTCAAATTTACCTGTTACTACACCCTGGAAAATGCTTTCAGTCTGTTCTGGC
TTTGAAAAATTTTCAGAAGGAAAAATTCCGAACTTTTTATCTGTTCCAAAAATTTTAATAAATTCATCGT
AAACCGCTTCGTTAAAAGCATTATCAGCAGGAATAACGCCTTCAACTACAAGTTCTTGACCTAAAAAGCG
CAAAGAAGATTTCATTTTGTGTTCCTCATGTTATGTCAGTAAGATTATTATAACACAACATAAGGAACTT
GTAAACTACATTTTGAACTTTTTAGACATTCCGTTGATGTTAACCAAAGAAGCTAATATTTGAGAAACTT
CGTTTTCCTCTTCTTTTGATTCTTCTACAAGGAATTGATTAAATCCAGCCATTGGACGAACTTCACCAGT
TTCCATTAAATGGTCTCCATCATATACTGATTCTTCTAATTGTTCAGAAGGAGGAACGATTGTACCTTCG
ATTAGATACTTGTTATAAGCAGTTTCTTTCATAAAGTACGTACTTACTTTATTAATCTTCAGTAAAATTC
CACGCGGTAGAATAACTTCAGCTTCTGATGGAAATCCTGATAAATGACCTGGAACGATAACTTTGATTCG
CTCAGCTCCTTTAATTACCATACCCACGCTAGTTTCAGCATCTTCATTAGCATATGTAGAATGACTACCC
ATATGCATCAAATCTTCTGCATCAACGGAACCTTCTCCTTCTCCAGAAAATACTGCACCGGAATCATCTA
GAGCCATATAGTTTTTACCATGCTCGCCAAAGATATTTGGTTTAAGTGATGTCGATACGAAGTTCTTGAA
ATAGAACATTTTGTTTTCAATGTTGTGACGCAAAGTTTTAAAGGTAACTTCTTGTCCGCGATAAAGCGTA
GTTCCTGGAGGAAGAACTGAACCTTTAGCGAATGCAGAATCCAACGTCTCGATGTGCTTAATAGCACGTT
CCATATATTCTTCACGGGTAGAATCTGGTTTACCCAAAAGGAACGAGTTCATTTCAACATATGAATCTGC
ACAATAATCTTCAATTACATCAGACTCAGCCTGAGTCAGTCCTTTTGGAGTTACTTCAGTGCTTGCATAT
TCATATGCCTGGGCAGCAGATTCATTAATCAATTTATAAATGCCATTCATGACAAATTGAATAATAACTG
TCTTTTCATCTGGCGTAGCTTTAGAACCTTTAACCAAATCATTGATAATTTTCTTAATAACATCAAAGCT
ATTAGAAATATTAATATCAGCAAGATCACTTAAAATTTTATCAGTTTTATAATCAAAGAATTCTTTATTC
TTTAAATATTCTTGAGAACCTTGATATGTTATATCGCTCTGTAACTTGATAGATGGATCACGTAAACGTG
CATGGGCTAATGCAATATGATTTCGGAAGTTTTCTAGTTCATAATCGCTAGATTTAAAACGAGAAGCACT
TCTCATACCACCGATAGCTCCTTTGCTGAAGTTTGAACCAATCTGAATAACGCCAGAGTTCATTGGTCCT
TCTGCTTTATATACCGGAACTTTAGATTCAAACTCTTGATATTTCTTGGCAGCGAAGCTATCACCCTGAA
GTGAAGCATCGACAGTAGAATATTGAGCTTGTGCTGCTAATCGACGACTAATTTTAGTTTTCTGAATAAC
CGCTTGGTCAGTACGTTTATCATTTTCTAAAGCAATAGAAGCAGCAACAGCGACAGCTTTAGGAACAGCA
TCACCTGTTTTAACATCTACATAAACATCACCGACCTTCGATTCAACTTTTGCGAATAACTCAGTTGAAA
TAGGAGGTACACCTGGAATGTCTTCTAAATTGGCATTTTTACGGTAAACCATAATATATGCATACTTTTT
ATCATAGTCCCAGATTTCCTTTAAAAGAACATATCGACCTGCTCCTTTAGTACGTACTAAACGGTCAGCA
ATAACTTGCATTTGACGAGCTGCGCCATTTGTTTTACTTTTTAGTACGCGGAATAAGCATGCGTCGATTT
TATACTGTTTCATTGTTTGAAGAGCAGTATCAAAAACAGCATTAATGACGCCAATTGGATTTCCACCCAA
GTTTCTAAGCTTAACCAGCGATAATTTCTCGTTGACACCTATCATTACGATATGCATCATTTTATCGCCT
GGCTTAACGTTTTTATTTGTATCACCACCAGAGGTGTATGTACAAAATCTAAATCCAGGAAGCACGCTTT
CTTCGCCGGCTTGAATAGCAAAAATTTGTGGTATTTTATGCTTAGGATTTAAGTTAACAACCGGCGCCGA
AGCGCCGTCAAATAATTCTGTAATAAGTTCCATGATTTATCCTTGAACGAACTTGTAAGGCATGTTTGTA
ATATCTATGCAAGACGCAATAATTCCGAGAGATGATTCTACTTTCTGTTTAACATTTGATGAAACAAATG
ATGCAAAGTCAACTCTGTCTTCTATTTCAATATCACCTGTCATTGCAACTACTTCGCCGGTTTCCATTAA
ACGGTCTCCGTCATAGATTACCGATTCGGTGAGTTCTTCTGTGGTCATAACTTCAGCTTGAATGAGTTTT
GTATTATTAGACGTGGTTCCGTCATTATTAGAAGCATCAGTTATTTTATTAACTTTGACCATCAATCCGC
GCGGTAGAATAACTTCAGCTTCTGTTGCTATTCCGAGACTTCCTGGATATACAACATTAACTTTATGAGC
TCCATCAATTGCCCATCCTATTTGAACTTTAACGTATTCAGGATTTTCTTTATACGCTCTTATTTCGTTT
GGATTAATAGTTATTCCTTCTTCATTTTTATCAACTGTTAATTCATTGCGAGCTTCTGGTTCTAAAAGAC
CAATACCAGCATGTGTAATTCCAAAACGTCCAAAAATGATAGGAGTTAAAGAAGTAGATACAAAATTTCT
GAAATAGAACACTTTATTTTTAACTAGCGCTTCGTATATAGGAGCAGTCATACTTTGAGCACGATAAACT
GTAATGCCTTCCGGTATGCGGTCACCATTTTCAAAAGCTGAATCTAAATTATTTATAGCAGATTCAATTT
CTTTTTCACTCATTACATCATATCGTTCTGGATTGTAACGACCTAAAAGAAGATTATTAATGTCTGTATA
TCCTGAACCACAATACTCTCTAATACCGCGCTTTTGTGATGGTGTATATTTAGAACCATCACAAGCAATA
GTAATATCAATCATTGGACCAGCACCAATTCCAGAAAAACTATAAATCATTCGTTTGAGGAATTTAGTTT
TTGCTGCATTCCAGGCATTTTTAGTTATTTCTCCCCAGACTTCATCTGGCTGCCCTTTACGAGTTTTATT
ATGTTTATCAAGCCAATTATCTTTATATTCTTCAAAGAATTGATTGACAGCTGCCGCGTATTTCTCTAAA
CATTTTATTGAAGTAGTTGGTTCATTTTTAATCGCGTTAAAAATTACATCTTTAATTTTTTCAGAAACTT
CATCAACCTCACTTTTTGAAAAGAATTTATAGTCATAGTGAAGTTCATTCGCAGTTCCTTCGGCAATAAT
TTTTGCTGCCTTTGTTTTAGAAGCTAATGAATTAATTCCAATTTTCATTTCTTCTGCTTCGGGAATTAAA
GGAGCGGTAGCAGGCTTATTGAAATTAGCTGCGGTAGATTCATACTTCTGGAATAATTCACTTTCAAATC
TAGAAGATTCCAATGATTGACTTTGCGCAATTGCTCTACGGGAAATTTTAACTTTAACGATTACAGCTTG
GTCAGTACGTTTATCATTTTCTTGTGCAATAGATGCTGCAATTGCCTCGTTTTTAGTTACTTGAGCTCCA
GTATCTTTATTGATATAAACATCACCGACCTTCGATTCAACTTTAGTAAAGAGCTCGGTACTAATTTCCG
GAACTCCTGGAATGTCTTCTAGTGATACATTTTTGCGATGTATAAGAATATATGCATACTTTTTATCATA
ATCCCAGAGTTCCTTAAGAAGGACGTATCTGCCACCTGAACGACTACGGATAAGTCTATCAGCAATAACT
TGAATTTGTCGAGCTTGACCAGCAGTTTTAGACTTAAGAATACGAAGCATACAAGCATCAATTTTATACT
GACGCATTGTTTGCATTGCAACAGTAAAAACTGAATTGATATAATTAATTGGGCTTGGACCAAGACCTTT
TAATTTAGCAATTGAACCTTTAGCAGTTAATGTAAAAGGAACAATATGCATCATTTTATCGCCCATTTTT
AAATCGCGATTAGTATCACCTCCAGATGTATAGGTACATAAACGAAAGCCTGGTTGTTCAATTGCATCAT
CAACATGAACTGAAAAAATTTGTGGTATTTTCTTCTTTGGATTTAAGTTTGTAATCGGAAGAGTAGTATC
TTCGTCAAATAATTCTGTAATGAGTTCCATCATATCCTCTCTAGTGTTTATTCTATTTATAAAATTAAAG
GCCCGAAGGCCTTTAATAATCTATAGGTAAGAGAGTACGATATATTTCAAACTTTGGACCTTTTTCATAA
GCATCAAAAGTTTCTGTGAATTTATTATAAGCATATGCATCTATAAATTCAATCATGATTTGTGATACAG
AAGTAGAAACATCTCCACCTTCTTTTTGAGCTACAACAATTGTTTCTAAGTAAGCTTTCATAGACCAGTT
ACCTCATGAAAATCGCCAAATACATCTTCGAACGTATTAGCTTTAGTTTTATCTTCGCGTAAACGAATCG
CAATCGGAAGAAATAATTTAACGTAATCAGTGCGGCCATCAGATTTTAACCAACCGTTGCATTCGCACTC
TAGAATTTTTCCAATATAATAATTTTGGTTTTCCATAATGCGAGTACGGTCAAGTTCATGCGATTTTACA
CCGGCTTTATCTTTTAAGCCTGAACCAGCATTTACCTTAATTTTTCCGCACTCTGACTCAAGAATAAATC
CACCTGCTTTAGTAGGGTCTTTACGGTGAGGATAAATTCCTACAATTTTTAAATCAACATCAATTACTTC
TTTAAATTTATAGAGATTTTTTGAACGAGCATTTTCCCATAATCCATCGATATTTTTGAGAATAATACCT
TCAAGACCTTGGTCAATATACTTTTTATAAATTACCTTAGCTTCATCTAGGTTATTTACTACCTGGTTTT
CAATTAAAATTACTTTATCATATCCCGATGTCATTTGTTCTAGTTTAGAAAAACGTACATCATACTTCAA
ACGAAATGCAGGAAGACCGTATATTTCTACCAACGGGACATAATCCCAGACCTGAAACTTCATGCATTGA
GCTTCTTTTTCAGAAATGGTTCCCTTTAAAGATTTATTGGCGATGCCATTAGATGCAGTACGTGATTCAG
CTACTTCTGTGAAGTCTTTAACTTTACTGTTTTCAGGATGAGCATCAAAAAGAAAATCTAGGCCTTCTGG
CTCCTTTTTAACTTGCTCATGGTATACCAATTCGCCATCAATTAACACGCCTTCTGGATGAATCTGGCGG
GCTTCAGCGGTCATTTTGATTAATTCTTCCTTAAGAAGATCTAATCCTAGATATTCATTACCGGCTCGTG
ATAAAAGACGAACATCATCTAATTCATCACCTCTGACTTCGGCAAAGCACCGAGCCCCATCAGCTTTTAA
CTGGGCAAAAGCTGGAAATTTGATATTCTTATTAATGCCTTTTTCATCATAAGAACTTGCAAGCATTTGA
GGTTGTTCAGGAATTAAACCTGGCCAAACTTTGTTTGCAATAGATACTGAAGCACCACATTCAAGGTCTC
GCATCATCACTCGACGCAAAACTTCAACATCATCTTTTTTACCATCGGTGATATATCCAGTTAATTCCTC
AATTGCTGCATTTCCAGTCAATTTCCGAGTAGCTAATGTGAATTCAATGAAGTCAAGCATATCGATAAGA
GTCAACATTCCAAAACTCTGGGTAGCAATACCAGGTTTAGGCCATTTCTTGATATAATACTGCAACCCAC
GAGAATAAGTCAGACGATATACTCGTTTAAGCAATTCATTATCTTTATTCTTTTCAAGAATTGCTTGCTT
CTGCTTAGTTGAACCAATAGATGCTATTTCGTTCAGAATTTTAAGAATCATTATTCATCCTTCAGAGTTT
GGTTTACAGCTCTATTATAAATCAATTCATCATTAAGCTCAGTCAAAGACCTATGATATGTGGTTCTAAC
TTTATTTCCTTGCATCCAGTGCTTGACGTAAATGAAACCTTGCTCTACACATTTTTTAAAAATTCGTTCG
TCTTTTTGAGCTCGGAATTCTGGATTGCATCTAAAAAATTGATTTACGTGACCGTAATCACGTGTAGTAT
TACCTTCATTTTCATAAATAGTGTGAACAACAAACATTAGAATGCTCCTTGGAAAATATTATCACCACTA
CCACTAGTAAGTCTATTAAAATACCCTGCGTCGCCAGGCTTAAAACTCCATGTATGGAATGGATGCATCT
GGTGTGAGTGTGTATAATATGGATTATAAGGATTAAATCCAGGAGTTCTCCAGGTAGTGTTCCAAGGAAA
AGAATCGTTTTTAATCATCTTCTCGATTGTATCTTTTATGGCTTTTTCACTATCAAAACTTTCTTTATTT
TCCTTCGGCGAAAAAAGCTTATTTTCTACATCATTCCATGTATAAACCCGCTGAGCAGTTTTTGGAATAT
TGTCACGCTCTCCTCGAGCCATCCAATAAACAGGAACACGTAATATTTCACTCGCATGGTCGCAGTGGTG
AGCGAGATCGTCAATATAACAAATTACGTTATATTTCTCTTTTGCCTTTTTGAACAGCTCTTCTTTTGAA
GAATCATGACCACACATCAATACTTCTGAGAAGGCACCAGGAAAAAGAGCATTCAAATTAAATTGACGAT
TCAGCAGAGCGTCAATAGAATCGCCCAATGCTGTAACAGCTACAAAATTATAATCTTCCTTTAATTTGTT
AATTACACACAGAGCATCTTTATATGGAGACAAGTAACGAATAAAATCTGAACGATTGTATTTTTCAATT
AACTTGACACCAAGTTCTTCATCACAGTTAAAGAGTTTACCAGGTGAAATAAATTTCTCATCTTGGATCA
TTTTTAAAATATGTTCTAACGGAAGATTATATTTCTGAGCAAAATAAGGAAGGCCTGATTGCCAGCTTAA
ACATACTCCATCAATATCAGTTAAAATAGTAGGCTTCATAGAGAGTCTCTTAATAGGTTTAACACATCAA
TAAATTCAGCTTCGGTTAGTATTGTATCATCTTTTGTTAGACCACTAGCCATGCTGTGCTTCAAAACTTT
TCCTTTCGAGGCTAGTAATGCATCACGAAAGCCCTTGTTTTGAATCGCTGCTTCAAAATATGCATTTGTA
TATAATTCTTTCCACGCTGGGGAGTATCTTGAAAACGGAACTCCGAGCCAGAAGAGGGTCCCACGGTCCT
GAGCTCTAGCATAAGACCTTCCAGCTTGTTGGGCGGCAAGCCCGGATAACCCAAATATACGACGTTGTTG
TTCAACATTTTTCACCTTGCATCCTTGGAGGAATCCTTCAAGACCTCCGAATTGAATACCATCCATGACG
AAAGGCCATTGGGCGAAATTACTTAATGCGCATGATGGCCATCTAAAATTGCTTCTAATCTCTAACTCAG
ACATCTTTAATACTTTATAATTTCAACATCCGCCCAATGACCATAACTTGGCAGACGGTCTTCAATAGAT
AATCCACCATCATATTTAAGCATTTTAATTGTCATAATATGGCTCTAAATGGTCTTCTGTGAGCGTAGAA
ACGTCAGTCACACGATAAGTAACTTCAACCATTTCCGTACCTAATAATTTCTGAATTAATTTCTTAAACA
TATTATCAGAACCTCATCTGAAAACCGTGTGATTTAACATTACCGCCGCCAATATCAGAAATATTAATTT
CACGCGCAATTGAAGGGTCAATGTCAATTTCGCGATTGAGTTTAGTGATAGCTAAAGTATCACGCCCATT
TACTGTACGGAATTCTAAAGGGCAGACTACATTAACGTAATTTTTAATCGATTCACTGGTAGGTTGCAAA
TGAGCAGGAAGGTCTTTAGGCGCCTTAGAGAAAACCACTTCACAAAAATTTTTGCGGGTATCAAAATAAG
TAGTCATAAACATAACATTTTCCTCAATAGGGGCCAAAGCCCCTCATTTATTTTAAATATCAAATTCGTT
AAGAACTACATCAAAGATTGCTTCAAGATGCTCAGGTTTAGCTCTGTTACTCAGAATATGACGAATCCAA
GTTTTAACCAAAAGCTTGCGATTAGCACCATTCCAGCAAGGATGAGTCCCTAAATCGCGTTGACGAAAAT
CATCATCCAGAGCGATTTTAAAGTTGGAACCTTCCATTGTGATTGAAACCGTGATGCCATTTTCAAATCG
CATATAAACATAGTTAGGAGTCATATACTGTTCAATTTCGCATACTGATCCATTTTGATGTTTCCAAAGG
CAGATAGTATCAATAGAACCTGCAATACCATTAGAAACATATTTACGTTCAAAGTTGATGTAGTTCATTT
TTATTCTCCTTTGTTTGTGTAAGATAATACTATCACAAAGGAACCATACTGTAAACAACTTTATGCAATC
TTTGGAAAATAAAAAAGGACTCCCGAAGGAGTCCTCAACTTATGCTTTCTGCTTACCAAAACGAGAAGCA
TCATCTCGAAGAACCGCACGTGCTCGGCGCATGATCTTCTCAACAGTTTGATTGATACGAGAGTTCGACC
CACGCTTGTAGCCAGCGCGTTTAGAATCACCAACTTTCTTTTCAACTGCTTTCTTTGCTTTAGCTTGTTT
TGCCATTATAAATTCTCTTTTAAACGAAAATGCAGGACTTATTGGCATTGCCTGCGAAAGCCCTCAAAGG
GGTACTTAGGTTTTGAATATTTACCGACAGGATAACCATAAACCCGTCATCATACCACCAAGACTTACAC
AGATAACACTTTTCTGACGCATGATAGTAACATTCAAGAGGTACACCGTAAAACTGCCGGGGTCTTAAAA
CTATAATGATTCGCAAATCATTAATCAGACAGTTCGACGGCTCCTCGATTTTAGCTCACACTAAGGCAGT
GAATCTCCAATAAATTACTTCAATGTTACCACAAAGTGACGAACTGCTTTTCGCGCGGCAGAAGCCAGAG
GCTTAGCATATTTAAGTTCATCTTTTTCCTGAAGCTCGGCAGCTAATGCAGTTTGAGCAGGATTCAGATG
TTTGAAATAACGCAGGATTTCAAGAGCTTCGGCTTCAACATCAATAGATGCGCCATAGTTTTCGTGACCA
TTATTCCATGCGTTTCGTTGCAGTTCAAGAGCGTGTTGTAATTGTTTAATCATTTAAAAATTCTCGTTAG
AGATTAAAACTCGGTAGTCACGTTCTTCTGAATTTCATCTTCTTTCGACAGATCTCTCAGTTGTAGACTA
CCACATAGAATTGTTCGGTTAACTTATTATTCCGACACCCAATTCATATTATTTATATCACTTATAAAGA
CACGGAATAGCTTTATAATGACAGGTAACGAATTTTTGTTTAATTTCTTTTGGCTGCTTAAGACCCAGAG
CTACAAAAGGATGCGGAACGTTTCGAATTTGACCAACTGGAAGAGAAGTCAAATCACCAACTTCACAAAA
ACCTTCAGGAACATCAGGACCGACAGAGTGAATTACACACAGTTCAGGAACTTCACCTTGAACACGTTTA
CCGATAATAAGTCCTGATTCTGTAACTTCTTCATCGCCGGCTTGTGCAGGTTCAGAAACTAAAATAACAT
ATTCACCGACAGCACGAATTGGTAGCTGTTGTACTTCAGACATCGTTTTTCCTTTTTGCTAACAGATGAA
TTAATAATAACAAATAATTCTTAAAGCATTTATTTACCAATAAATTGAAGCAAATGCTCAACTTTCATAC
CATTAACAGAAATCAATTTGTCAATAGAAAAACCTCGCCAAGCGCCAAGTTCAACATCAAATACTGGAAT
CATATCCGTAGATTCTTTCCGAGTAGATTCAGTCAATTTACCGGTTTGCATGGTTGGCATAAAGTCTGCA
TCACGAGTACCTTTCATAGTACGAATAGTACCATCAGACTTTTCAAAAACTACGTTTGAAACACCCATGG
ACAATTTAGTTTTCAAAATTTCACGAATTGCTACTTTCTGCTCAGTTGTCAGTTTCATTTATTTACCTAT
TACAGTTTTAATATGAGTTGTTCCACGTTCTTTAAGGGTGGAAAGTAATTTTTGGAATTTTTCTAAATCA
GATTTCCAACTATATGGTTTATCAATACAAACCCAATTTGTCTTATAATACTGTTTCCATTTAGAGAAAA
AATATTTCTTATACTCTACAGCAAACGAGATGTTCTCATTAGAATAAGAACTAATTGCTGTGAGCTTTAC
CAAACGAAATTTCATTATTCACCGCAGAATTCGTTGATATTTTCCCAGTTTAACTTATTCAAGTTTTTCT
TAGGAACATTAAACACTTCAATACCTGCATTTCGCAGAATATCATCCCAGCCAGGTTTATTTTTATCATA
TGTTTCGCAATAAACCAGCTTTTTAATACCAGATTGAGCTATCGCTTTTGCACAATCTGGACAAGGAGAA
AGTGTTACATACATAGTAGCACCTTCAATAGAAGAACCATTTCGTGCAGCAAACAAAATTGCATTTAGCT
CAGCATGAATTTCATTTTTAGACGACCATTCAGAGTGAGCACTACGATGTTCTTTCGCCAAGACAAAACG
ATCAGTTGAACCAAATGATACGCATTCAGGCTTATGGCCTTGAATGATAGTATGTTTAGGCTTATTCAGC
AACCAACCTTGCTCAGCAGCATAATCACAACAGTTCACACCCCCTGCGGGTGAACCATTATACCCAGTAG
AAATAATACGTCCATTCTTTTCAATTACTGCTCCTACCTTCCAGGAGCAACATTTTGATTCCTGCGATAC
TAAATATGCAATTTGAAGTACTGTACTCGCTTTCATTTCATAATCACCAGATAAGCAGATTTAGCAGTTT
CAACACGATAAATTTCGTGACGAAGTTTAGTTATACTTTTAATAACAGAACTAATTATATTCTGCCCATC
TTTAAAGCGGTTTTTCTTATCAATAAAAACTGCGCCAGTCATCTTTTTATGAAGCTCAACTGGATACTTC
GTCACAATAATAGCATCATACACAGAAGGATGAATACTATTCACCAGAGTATCATTCATTAAAGTTATTC
TAATGAACTTTGCTGTTTCAGAGTCAAGCGCTCTATGATCGCCAGTATCATTTTCAAGACAATTATCAAT
TATATCAGTTAAATTCATCATAGTACGCCATACACCCTTTGTGCTTCAACTAATCCATCAAAATCCAGTT
TAAGATGCGATATTTGATCGCCATCACCTGGATTCACAATTACTAATACTGAACGAGGAGTTTCGGTAAT
AACACGAACCGATGTTTCAGGAAATCGTTCAGAAACCTTATTTACCAATTCCTGCGCAAATAGCTTAACT
TTTTCTTGGAATTCTTTAACAGTAATCGGTTTTTCACTTAGCAGCATTTTGTTTTCCTCATTTGTTTGGT
AGAGCTAATATCACAACTCTACCGTAAAGTAAACTATTAAATTGCTTTGAATTCTGCTGTCTGCGATTCA
AAACGAATATCGCCTTTGATGACTAGCTCAGCATCAAGACCGAATACAACAATGATATGCGCGGAACCTG
GATACAGCGTAATGGCAACAGAATCCACCTGGTCTGGAAGCAAAGTGTTCAATACATGAGTCACTTGAGC
ATGGATTCGAAGCTCGGCTGCGTTATCAAGTTTTTCAAACATATTATTAGCGATAATTTGGCTAAACACT
ACTTCTACGATTTTAGAATAAGTAGGAAACATATTTACCTCACATAATTTTCTTCAAGCCAATTAATAAT
ATCCCAAGTTTCATGGTGCAAAGCCATTAAAAATCTCCCGAGGCGACTTGCCAGCATTCAACACCGATGC
GGCGCCACATTTCAACTACTTGAGTTCGGTCATCAATAGCTAATTTCACATCAAAATGTGGTGCAATGTG
TTTCCAGAAAATTTCTTCTTTAACCACATCGTCTTTACGGGTATCGCCTTGTTCGCGCTGACATTGCATA
ACTAATGGAACGCCAGCAATGTCCTCAACCCATTTACGGGTCATACGATAATATTTCGTTGGGTCTTCTT
TAGTTCCACTTTCACGGCCTGAAACGACTACAATGTAATATCCTTGCTTATCGTACATCTTAGCTAGTTC
AACGACCATTGGATTAATAATATCGGTATCGCATTTTTCAAGGTCATAAGGACCACGACCATTCATTTTT
GCTAATGTGCCATCAACATCAAAAATAACTGCTTTTGGTTTACCAGGAGTCCCATTATATACTGGAAGAC
CGAGATATTCCCGCATGCTTTTATACATTGAGCGTAAAACATCAATTGGTACTGCTTTAGTTCCGCGTTT
TGAGTTACGTTTAACCAATTCAGTCCAAGGAACATCAAACACTTTATATTCAATTTGATGCCCAAGCTCT
TTGGCAAACTCTTCCCAGACCTTACGTCGTTCAGGATTTAGATTAGTATCTGAAACAATTACACCCTTCG
TTACGTCTTGGCATAGAATCATGTTAGCAACATCATGCTGCATGTAAGTTACGATGCCTTCTTTCTTTTT
GGTATACTTGTACTCATCGCGTTCTTCATGCGCCATAATAGATTGGCGATAGTCATCACGATTGATATTA
TAAAACCCGGGATTCTTAGCAATAAATTCACGAGCCCAAGTACTCTTACCAGAACCAGGACAGCCAATAG
TCAAAATAATCTTTTTCATCATTTAATTCCTAAGAAAACTTCAAGAATACGAATATTGTGCTCACGCCGT
CCTTTGTACAATTCAGCTGTTGATTGATTCACTGATTTACTCTGAACATTGGATGAAATAAATTTTATCA
TGTGATTTTTAAGCTGATACATATCAAGCCCACGAGCTTTCGCTTCTTTTCGCAGGGCTTTACCAGCATC
ATCTAAAGCTTTAGCAGGGTCTTCATCATTTAATACTATTCCACGATCCAAATCCATGTATACTGCACCA
TGACATGCATCAATGTAACGGTCTGAGCATTCAATATAGCATTAGCAGAGTTTTCATTTATTTTTCTCAA
CCAATGATTGAATATAATCATGCAGGTCTTTAGATGCTTTGCCCCACTTATTTTGATATTCATTTTTGAG
ATTAGCACGTGATTGAGCTAACAAAACATCATTAGTCGGAGGTAAAGATTCTAACCGCTGAATCTGGCGT
CCATAAATCATTGCAGCCATCTCGGATTCATAAATCAATTCTTTGAGATGTTCAAATTGATGCCATGAAA
TCATTTACATTTATCCTCTTTTAACTCTTGACGATAATAACATATCATAGTTTTCTGGTCATGTACATAT
CGTTTTACATCATTAAGCCAAATACGAAATTCCTGGGAATCTTCAAATGGCATACCGACCCAAGCTTTAC
CATCGATAACTTTAACTTGCCAAGATAGTTTAGCTTCATCATATGACTTTATTTGTACAGGCCAATTAGG
ATGAACTGTTTCTTTCTTTACTTCTAGAGGCTTTGTCGAACAACCAACTAGAAGACCAATAGATAATATT
ACTGCTGATAGTTTAATCATTTAGAAAGGTCCTGGATGTCTTCTGCGAACTTGTTGAAGGAGTTGTTGAT
TTGTTTTTCAACCAATCCTGGCTTATGAGCCACCACATCCGCCTTCTTTGCGTCTTTGCGCAGTTTTTCA
TTTTCACGCTCAATAGCAGAAATTGCCTCACGATTTTTAGTATTCATCGCATCAATATAATTATACTGAA
TTCGCAAATTATTTAATGCTAAAGCGTTTTCATTGGCCGTTTTTGTAATTTCTACAACAGACGTTTCTAA
TCTTTCAATTTTATTTTTTAAAATTAAAGAAGTTCCGCCTAATGCAATTACAATTAATAGCAAACCTGCT
GTCGTATTACTTAATTGCATAAAGTTTTAATAACCTCTATAATATCGTCTTGAGAAAGACCGTTAATTAA
AATATGATGTTCAGCTGGAGATTTAGAAATTTTAAAGCATGCCTCAACATCTTCTGCCATATCCGATGCA
CTACGATTTGGATTACTAATCCCAAGGCGGTGTTTTCCCGTCAAAGGATTAACGATGATGTAGCATTTAC
AACTATTGATATGAACATTAGGCTGAGTCTGATTAATGAATACTTCGCACTCATACTTAGCGAGTTGATT
TTCTAAAAAGACTTTCATCTCTTCAACCGCATCAGGAAGCATATCACGGGCTTGCTCAAGACGACGATTT
CGATATTCTTTAATGGTCGTTTTCCGCTTGACTTGCTTAGCTAAATCTTTCTTAAGATCAGTGATATATC
CAACTCGACGATTTCCTTTGAATACAGAAATCCCATCTGTAGTATCACCGTATGCTTCAACGACCATTTC
AGTAGTAATAAGCTGCAAATCCATCATAAAGTCCTCATGTTATGTCAGTAAGATTACTATAACACAACAC
GAAGGACTTGTAAACAGCTTAGTATCCTTCCGGGATAAATTTTTTATAATTTTTCAAAAAATTCTGTTCG
ATTTCACACATGACCTTTTCTTGACTATCATACCCCTGATATAGGCTCATGATGATACCGAACAGGTGAT
CCATTCCAGCACCTTTAGCAACACCTTGCGCTTCCATTGCATAAGTCTTTCTATCCTTACCGCAGTTTTT
ATTATGACAGTCAAGAACTAAGAATAGAGCTCGATCTAAGTAATTCAGATAAGTCGTCTCAAATGCTTCA
ATTTTTCTGTATGAATATTCATCGCCGGCATACATTGCTTTAAGATCGTCTGATGCACCGTCAATAATAG
TCTTAAACAATTTTTCTGGATTATCTAATGAACTTTTTGTGCTATGAAGAGACACGTACCAGTCAGACTT
AATTTTAAAATGAGAACCATCTTTCATTACTGCAACATAGCCTTCGATGTTTTCTGCATTTTTAGCTTCT
TCTACACATTTAGGGCTATCGATTTCGAATCGTTCAACTAGATATGGACGAAGAGTAGCATCTTTATAAA
TATCATCGTATGAAATGTATTCACCTGTTTCATTTTCACGAATATTCAATAAAATGATTTTCATCTCTTG
ATAAGCAAGAACGATTCTATTCGTCGGAGCGACGAATTCGAAGTTAGCAGTAAATCCATCTTCAGCTAAT
TCTTTAAGTCTATCACGCAACCGATGGTGATTAATATTCATCAAAATACCATTAGCCATTAAAGCCTGCT
CAGATTTGATTGAACCCTTTGATTTGAACAGAATTTCATCACCGTCTAAATAAGTTGATACCAAAGACCC
ATCTTCTTTTGTTAGAATGTAATCAACATCATTTAAATCGATATTCATCGTGAATGGATTTTCATTCAAG
TTAAAAAACTTTTCCATGGGACGAGAGGCAATTTTTACTGGTTTTTCTCCATCCATTTCAAACATAATTC
CACGACATTCCAATGCGTCTGGAAGTAACCAATCAGAATAAGATGCATAATTATATGAGAAAATTCTGTA
AGTTCTTCCAGATGCACTTACATCATCCGAGTAAAAAAACTTACGCTGTGAATCCTTACATAGTTCCATT
AAATTGTTAAAAAGTTCTTGCATTGTGTATCCTCTTTTGTGTTTTGAATATAGTACCACACTCCATGTGG
AAGCATCATTTTTTCTTATGTTGAATATTCCAAGGCGGGTTAAACAGTTTAATGAATAGTGGCTCCTCTA
AGTCAATCGTTGCGATTGTCATTGTACCTAACTCATTTGTCATAGAAAGATTAAAACATTGGCGGGCGTA
AAATTCAACTTTGCTTCCTTCCTTTAGAGCAGCATGAATTAATGCAGATTTAGTAGAATCAGACGTTTTG
TCTTTACGGTTAATAGCAGTTCTATAATAATTTATTCTTTTACGTAAATTTTTAGTTTTTCCAATATAAA
CAAGCTCATCATTTATGGCAATAGCATAAATTACGTTATACTTGTTTGGAATAGATAATTGTTTTATACT
TCCGTTGTCGTCTAATTCTAGCTCAGTATATTTAATAAATGAATATTCTGTTGCAATTTCTTTCATAATA
AAATGGGCCTTGCGGCCCACTCCTTAAAAATATTTTTTAAAACTCATCATAACTTTATCATCAACATCAT
TATCAATCTGTGCAACAAGGTAAGATGACAGTTCTACTTCTTGTGGCGCGGATTGAACATTATCAGAATT
AAGATATTCACGAATCCAAGGATATGGATGTTTAACCGGAGCATCGGTAATTGGGCATGGAAGACCGCAC
TGTTTCATACGAGATACAGTTAAGTAATCAATAAAGCTCCACATGCTATTTGTATTTAGTCCGGGAACGT
CTCCATCTTTAAATAAATGAACCGCCCAATCTTTTTCTTGGCGGTTAACTTCCATGAAAATATCAACTGC
TTCTTGTTCACACTCTTTGGCAATTTTAACCCATTCATCACCATCAGTGCCAAGTTGAAGTTGACGAATA
ATATATTGTGTACCTTTAAGATGAAGCTGCTCATCACGTGCAATGAACTTCATAATCTTGGCATTACCTT
CCATGATTTCCATGTTCTTATGGAAGTTAAAGGTACATGCAAAAGATACATAAAAACGAATAGCTTCCAA
TGCGTTGATTACGTGCAGGCAGAGGTAAAGAGAGCGCATTAGTTCACGTTTCCAATACATTTCATGCTCT
ATGGCATCTTTAATATCATCTTCGTCTGCGTTAATTTCTTTTTTGTACTCAATATCAGCTTTAGCATTCT
GCCAATATCTAGTTTTCTCAATAACATCATCATAATAACGACCAATAGATTCAGCACGTTTCATGATAGC
TTTATCTAATACAATCTCATCAAATACCTTTGATGGATCAGTATAAAGATTTCGCATAATATGAGTGTAT
GAACGACTGTGAATAGTTTCACTAAAAGTCCATGTAGCAACCCATGTATCAAGACTTGGGTCTGAAATTA
ACGACATAAGTACAGCAGACGGTGCACGACCCTGAATGCTATCTAGAAGTGATTGATACTTCAGGTTATT
AGTAAAAATATCTTGCTGATATTGAGGAAGCTTGTTAAATTGCGCAGCATCCATCATTAAGTTTACTTCT
TCAGGACGCCAGAAAAATGACAACTGCTTTTCGGTTAAATCTTCAAAAACTTTATGACGTTGAATATCAT
AACGCGCAATACCAAGACCTGAACCAAAAAACATAGGTTCTTTTAAAACATCAACTGGATTTGTATTAAA
AACTGTGCTCATAAATTTTCCACTTAGTTAATAGATAGTGACTCGTCCATGAGTCAAATTATATCATAAT
TTACAGGATGAACAATCTTCAGCTTTTGGAGTTTCTATTTCATAATCATCAGTACCAGAACCATCGCGGG
TATTATGATAATAGAAATTTTTAATGCCATAATACCATCCGTATAACATGTCATCAATCATTATTGACAT
TGGAACCTTTCCTTTTGGAAAAATCTGCGGGTCATAATATGTATTCGCTGAAGCTGATTGACATACCCAT
TTCAGCATAATAGCTACCTGCGTAAGATAAGGTTTATTACCTTTCTTAGCTAATTTCCATGTATAATCAT
ATAGGTCTATGTTATGTTCAATATTGGGCACGACTTGATTAAAGGAACCCTCTTTTGATTCTTTAACAGA
GACTGGTCCACGTGGAGGCTCGATACCGTTTGTACTGTTAGAAACTTGGGAAGATGACTCACATGGCATA
AGTGCTGATAATGTGCTATTACGGATGCCAAAGAGCTTAAGGTCTTCCCGCAGCGACGACCAGTCACAAA
CGTATTTTGGAGCTGCGATTTGGTCAATCTTTTTATTGTACCAGTCGATAGGTAATTCGCCTCGAGACCA
ACGAGTGTCTGAATAATATTCACAAGGTCCTTTTTCTTTGGCGAGCTTAATGGATGCTTTAATGAGTCCA
TACTGTAATCTCTCAAATAGTTCATGTGTTAAATCGTTAGCATCTTCATAAGAAGCAAAGTTACTTGCCA
GCCAAGCTGCATAGTTAGTAACACCTACACCAAGGTTACGACGCTTTTTAGCTTTTTCTGCTTCAGGAAC
TGGATATCCTTGGTAATCCAACAGATTATCAAGAGCACGAACTTGAACTTCTGCCAATTCATTAATTTTA
TCTTGGTCTTGCCAGTCAAAATTATCTAGTACGAATGCAGAGAGAGTACACAATCCAATTTCAGCATCAG
GACTATTCACATCATTTGTTGGAATAGCAATTTCACAGCACAAGTTACTCTGACGAATAGGTGCCTTTTC
ACGAATAAACGGAGTATAGTTATTCGTATTATCAATGAACTGCACATAAATCCTTGCTGTTCCTGAACGT
TCAGTCATGAGCAATTCAAATAGTTCACGGGCTTTAATACGCTTTTTACGAATATTAGGGTCTTTTTCTG
CTGCTTCGTATAATTCACGGAAACGGTCTTGGTCTTTAAAATAAGAATAATACAGCTCTCCACCCATTTC
ATGCGGACTGAACAAAGTAATGTAATCGTTCTTTCCGAATCGTTCCATCATCAAATCATTCAGTTGAACA
CCATAATCCATATGACGGATGCGGTTTTCTTCTACGCCTTTGTTATTTTTCAAAACGAGAAGATTTTCAA
CTTCCAAATGCCAAATAGGATAATAAGCAGTAGCAGCGCCGCCACGAATTCCACCCTGTGAACATGATTT
AACAGCAGTCTGAAAATGTTTCCAAAAAGGAATAACACCAGTATGGCGTACTTCACCCATGCCAATCTTA
GAACCTTCGGCACGAATCATACCAACGTTAATTCCAATTCCAGCGCGTTTAGAAATATATTCAACAATTG
AAGCAGAAGCTTTATTAATTGACTTTAATGAATCACCAGCTTCAATAACAACGCATGAACTAAACTGCCG
AGTTGGAGTACGGCAACCAGCCATAATAGGAGTTGGCAGTGAAATCTGTCGAGTAGATACTGCTTCATAA
AAACGAATAACATGTTTTAATCTGTCAACAGGTTCATCTTGATGCAATGCCATTCCAATAGTCATAAATG
CAAACTGTGGAGTTTCATAAATTTGACCAGTGGTTTTATCTTTAACGAGATATTTTTCTTTTAATTGCAT
CGCCCCGGAATAAGTAAATTCCATATCCCGCTCGTGCTTAATTTTTGATTCTAAAAATGTAATTTCTTCT
GCAGAATATTTTGACAACAATTCAGGGTCGTATTTACCTTCATTTACACAGTAAGAAATATGGTCAATAA
ATGAACGCGGTTCATACTGCCCATAAACATGTTTACGAAGAGCAAACATTAAACAGCGTGCAGCTACATA
TTGATAATCAGGTTCTTCAACCGAAATAGAATTCGCAGCAGCCTTAATGACAATAGTCTGAATGTCATCA
GTGGTCATTCCATCACGGAGATATGATTTAATATTTTCATATAATTCATAAGGATCTACAGATGTTCCTT
CAGCTGCCCAAGATAAAACTTTAATAATTTTTTGCGGGTCAAAGCTCTGAGAAACACCACTACTTTTGAT
AACATTAATTAATTGCATAAGTCCTCAACTTGAAAATCGTCTTTAAACAATCGGTTAACTATATGAGCTA
TTATATCACCATGACACGGCTTTGGTTTACATGTGCATCCTAGCCTCATTCCACGTAAAGGCTCTAAATG
TTCTTTAGTTATTTCTCCGGATTTAATTCGACGTATAAAATCTTTTTTGAATAATTCAATGGCAGCCTCC
CGGCTGCCAGCATCTTTACCGACGTAATTTCCCCAAAATGTACCACGGTGAATATTAACATCAAAGTCGG
ATTTATATTTATTCACTACCTGGCATAGACGGCCCGCGCGGCGATAATTCGTCATATTGTTTTTCCGTTA
AAACAGTAATATCATAGTAACAATCTGAAGAAGTTTTAACTGTAGAAATTTTATTATCAAAATACTCACG
AGTCATTTTATGAGTATAATATTTTTTGCCATAAATGATAATAGGCTGATTTGGTCCTGGAACTTCTAAC
TCGCTTGGATTAGGAAGTGTAAAAAGAACGACACCAGAAGTATCTTTAAATCGTAAAATCATATATCCTC
GCAATTAAATTAAAATTATACCGCCATCTTTCCTTTAATTGGCGGGTGAGATACATAGTTGTTAAGAACG
AAATCTTTAGGCCTAAGTTTAAGAACATATTTTAATTGTTCTTTAGTAGAAAGATATCGGAATTTATAAG
GTAGACCACTTATTACCAGCTCACAAAGCTCTTTAGGTTCACGACGCAAAATTTCTTTACATTGTTCTAC
GTGATTCATATAGATATGAGTATTACCGCCAGAAAATATCAAATCTCCAGGAATAAGATTACACATCTTA
GCTACAATATGAACTAACGCAGCATATGATGCAATATTAAATGGAAGACCAAGAAAAACATCTACTGATC
GTTGATACCACTGCAAATCCAAATAGCCATTACGCACATTAAACTGATAGAACATATGACAAGGCGGTAA
TGCCATATATTTAAGTTCAGCTGGATTCCACGCAGAAACAATTTGTCGCCTATCATTCGGCAGTTTTTTA
ATACGATCAATAACTTCTACAATTTGGTCTACACCGCCAAAATCACGCCACTGTTTTCCATAAATTGGAC
CAAGTTCACCGCTATGGTATCCTAAATCTTTTGCTTGATTTTCGTAATTTTCATCCCAGACTGTTTTGCC
TTGAATTAATGAATCATGCTGAATTAATCGTAAATCATTGACATTTGTGCTTCCTGATAAAAACCAAAGT
AGCTCAGCAATGCAAGCTTTCCAGGCGAGCTTTTTAGTTGTTACTGCAGGAAAACCTTTACTTAAATCCC
AGCGTAATTTAGTACCGAACAAAGCAATTGTTCCTGTGCCTGTTCGATCATCGGTTTCATAGCCATTTTC
AAAAATGTCTTTAATTAAATCTTGGTATTGTTTCATTTAGTACCTTATATAAATTATAATACATTTTATG
AAGCTAAATAATCAATACGGTTTAGCATCAAATTTTCTTTCGATTTCAGGAGTGAAATATAATTCTTTAC
CGCGTTTAGAAAAGCGACCAATAATATGATAATTATTCTCATCAAACGTAATATTGCCAATATCCATGGC
TTTCAACCAAATATCGATATTTCTATCCAGTTTTATATCAAAATTCCAATACGGAGAACTATTACCGAAA
ATACTGCAAGCGGATTCAGTGAAACAACTGCTATAAATCTTGTCTTTAGGAACTACTAATTGATAGACGC
CTTTAATAAACTGAGGACCCTGCCATTTTGGTTGTTTCGCGTCTTTTTCTAATAGAATAGGGTAATAATT
AAAGTTCATATTTTCCGCCACGCGTTATTTCATTTATACACTGATTCCGTAAGGGTTGTTACTTCATCTA
TTTTATACCAATGGGTTTCAACCATTTCACGCTTGCTTATATCATCAAGAAAACTTGCATCTAATTGAAC
CGTTGAATTAACACGATGCCTTTTAACGATGCGAGAAACAACTACTTCATCCGCACAAGGTAATGCAGCA
TATAACAAAGCGGGTCCGCCAATTACGCTTACATTAGAATTCTGATCAAGCATAGCCTCGAATGGTGCAT
TAGGACTTGACACTTGAATTGAACCGCCAGAAATGTAAGTTATGTACTGCTCCCATGTAATATAGAAATG
TGCTAAATCACCGTCTTTAGTTTCAGGATAATCACGCTCGAGGTCACATACTACAATATGGCTACGACCA
GGAAGTAATGTAGACAATGACTGGAACGTTTTAGCACCCATAATCATAATTGTACCTTCAGTACGAGCTT
TAAAATTCTGGAGGTCCTTTTTAACTCGTCCCCATGGTAAACCATCACATAAACCGAATGCTAATTCATT
AAAGCCTTCGACCGTTTTAGTTGGAGAATAAGCGAATACCAATTTAATCATTACGCAAAACCCCTTTCAA
TAAACCATTCAGTGGCTTTATTAGCGTCAAAGAATAATTCTTCATACGTCTTTTCTTTGTTTTCAAAGAC
TGTCACACAAACACGTTGACATTCTCCGCAGTATTCTTCTGACATACTCAAAGCGTCAGAAAACATTTCA
TTAAATTCATTTAAATCAGGATTATGCAATGCGTTAAAAATTGCATAATCGAATTCATCATTCATAAATT
CAAATACAAAAATCATATCATCTCCTTCAAACAGACTTTTTCACAATTTTCCAATCAGTTTTAAACTGCT
CGACGTCAGAATGGTAAATCCAGAATCCTGCGCTTTCTCCGTCTTCATAAAGAGGACATCCATCGCATTC
ATCTTCCCATCCCATATCACGTAAAAGATGTTCAGCTTTTTCAACAAGTTCAGAATCTTTACCGATGATA
TTAAAATACCATTTACCTCTAACTTCTGAATCTTTGATGCTTTGGCGTTGTAATCTCATTTTATTCTCCT
TAGTTGATAGGGTAATAGTATCACACTACTACCCTTCTGTAAACTACTTTTTGAAAGTTTTTCGCAAAAG
TTCAATGATTTCATCTACATTGTTTTCGTCTACAATGCAGTGAATTTTTGTTACGCCAGAAACCTTGTCT
TCGATTTCATCTTCTTCAGAAGTCTGTTCTTTATACTCACGAAAACAATGAAATTCATCTTCACAAATGT
TAAAGTAAAAATGCTTTCCATTTGCGCATTCAATGTGTTTTATTGCTCTAAATCCATCAACAAAGAAAGT
TTCTTTAACTTCAAACCACCCGCCATTTTCTTCAATAATTTTAACTATTGATGAATTAGAACGTGGGCGA
TAATTAATAAATGTATCAATAAGTCTTGGAACAAGTTCATACTTTTTGCCAATATACATTACGTTTTCCT
CATTTTAACGGGGCTGTAATAGCCCCTTGATAATTATTGTTCAATCAGTCCCATGTAAAATTCTGCGTCT
TCAGAATCCATACCATCGCAATATTCATTAGCCATAAAGCGGGTGAGGTCTTCAAGAGGACCTTCAATAA
CGATTTGAATACTCCAAAACTTAGAATCTTGCACGCTTGTGATACTAAGTTCAGGATAACGATTACGAAT
AATTTCTTCAATATATTCAAAATCAACGATGTCAATATCAACTTTAGCCATATTATTTTCCTCTTTAATC
ATCAGCAGTATTGCCGATAGTTGTATAGTACCATGGAAGGACAAGGATGTAAACCGTTTTGTGAAAAATT
TTTGAAATAAAAAAGGGGACCCTAGAGGTCCCCAATTAATTAGTAATATAATCTATTAAAGGTCATTCAA
AAGGTCATCCAGGTCCGTGTCATCAGCACTAGATGAACTGCCAGAGCTTGAGCTCATAAAATCATCTTCA
GTTTTTGTATTGAAGTCATCAACATTGAATGCATCCAAATCATCAGCAACTTTATCAGCTTTCTTAGCAG
CAGTCGCTGCGGCACCACCCATAGCAGCAGTTCCCATAACTTGACTAAACTTAGTGCTCAGTTCTTCGAA
CGATTTGAATTTATCTTTAGAAGTCATTTCAGAAAGGTCAACCATTTGTTCGAACAGTTCTTTCTGGAAA
GATTCATCGTCAATGTTTGGAATCGCAGATTGATTCAGGAATTTAGATTCGTCGTAGTTACTAAATCCGG
AAACTTGTTTAACTTTCAGTACAAAGTTAGCACCTTCCCACGGACAAGTTACATCAACCGGAGTTTCACC
CATTTCAACATCAACTGCAATCATTGCATTGATTTTATCCCAGATTTTCTTACCGAAACGGTATTTAAAT
ACTTTACCTTCGTTTTCTGGAGCAGCTGGATCTTTTACTACAAGAATGTTAGCCCAGTAAGAAGTTTTAC
GTTTAACAAGACCGTACTCTTTATTGTCAGTGTTGTACAAATCATTTTTACTGATGTACTGACATACTGG
ACAAGAATCGTAATCACCGTGGGTAGATGAGCAATTTTCGATATACCATTTACCGTTTTTCTTGAAACCG
TGATTTACAAGAATTGCAAATGGTGCTTGTTCATCATTTTTAGACGGAAGAAAACGAATTACTGCTTGAC
CGTTACCCGCATTATCGAGTTTCAGTTTCCACTCGCCTTTATCTTCAGAAGAAAAACCACCTTTATTTCC
AGCCAGTTTAGCCATTTGTGCAGCGAGTTCAGCAGTAGATTTACGTTTAAACATTTTTATTTCCTTTTTA
ATTTAATTAACAGTTGGTGCTATGACGATGTATGACCTCATAGCTGGTCAGTGAGATAATTATAATCTAT
TTATAATAAGCAATTAATACTTGCAAGATTTCACAGTTTCAATGAAAACATTTTTAGCTTTCTGTGAATC
AATATTTAAAATTTTTCTATAAGCCTTTAACTTTATAGAATAATTATTCCAGACTAAATTATCAGTCTGT
TCATCGTGTTTATCAATTATATTTAAAAACGAATCAAGCAAGATAAACGTTTCAAACGAAATTATATTCG
ACTGAAGCAGTTTAAAAATATAACTTGATTGAACCTTTGGATTATATTCAAAGATTTCTTTAAAAGCAGA
AACTTCAACTTTTTTACTAAAATAATAAATGTTGCGAATATCTTCTTCAAACTTAAATTTAATTTGCTTT
AAGCGTCCGATATATTCACGATAAAACACAAGTGCATCAGCGTCAGAGATGTCACCAATCCAAGCATCTT
GGTTAGCAACCAAATTACTTATAAAAATTAAAGCAAGTTCCTTTAATTTATATTTTTCTGATAACTTCTG
GAAAAAATACTTATCCCTTCGCTTTTGATAAGCGGCATCAGACACCCGCATGCACCAATTATACTTAATA
ACATCATACTTTCCATTCATATGCTGTTTTATCATTAAGTATAATTTATAAACTGATTTACCATCAATGT
ATCTTTCACCACCAGCAGGCATGCGGAATTTAATCATAGTAGAAAATCTAATGTATTAGTTTTTTCACAG
CGAACAACAGAAGGACGTAAAAGATTTTCGTCAATAGCTTCTGACTGAATTTTTTCAATTATACCCGAAG
GAATAAATTTAGCAAATTGAGTTTCAGGAATAGAATTTTCTTCTAAGAATGCTGTTGTAGCTTCAAGATA
ACTCATTCCAAACTCTTCTACCATTTTTTCAATAATAAATCCATTTTCTTGACGATCAAGAAGCTTTGCT
ATTTCATCCTTTTCTTTCTTGATTGAAAGTTCTTTTTCTGAAAGACCGGTCTCATCGACCGGACGAATAT
CATTTAGAGAAAACTGTGTCATAAAGTTCAACTACCTCTTCAGTTTCAGCTTCAAACACATCACGGTTAT
CTTTATGATACAAAGCTAATAGACGATTAAACATCTTACCATCAACGCCAAGTTCATCTTTAGCACGAAT
TCGAATATCTTTAATCAGTTCATTATAACCGGAAATTTTCAGTTTATGATCAGATGCTTCTTTAATAAAT
TTAGCCAAGTCTTCGCCATGGATAGCTTCATCAAATTCAACCATTTCTTTTTTAGCCATTATTCACCTCA
AAATTCATTAATGCTATTAGTTAATTTAGAAAGACCCGCTTTTACAAAATATGAATAAATTTTGCCACGC
GGTGGTAATTTATATGAATTATAGTAATTCACAATGTTTGAAGCAATATTATCAGGAATATAATCAAAAT
CAATTAGAACTAAATTTTCTTTATAACGATTATATTCAGATTCTGTGAGAAGCACCTTAGCTTGCTCACG
GTCATTAGCAATGGCTTCAACGATTGAAGTTTTCATTGAAGGAGTTCGTTCACCTTCAACTCTGGTAAAC
CAGAAGTCAGATCGTACTTTAACTGAAGCAACGTTATCCTTTTTGTCGCCTTTAAGGATTTTAGTCATAC
AGTCAATTTCAGCAGAACCGCTTTTAATTTTAACCCATTTCTTATGCATTGGAGACCATTGCTTAACATT
TGGATATTTGTGAAGCTGTGTAAAGTCACCATCCGACGAAATGATTAAAATCTTATGTCCTTCTAAAGAG
AACTTTTTAACAAGAACAGCAATATGGTCATCCGCTTCATACTTATCAATATCCATAACAATGTATGGCA
TATAAGCTTTCAATTCATCTATAACTTTATGGCTGGATTCAAAATAACCTTCCCAGTCCCAAGTAGATTC
TTCTCGTGCTTTTCCACGGTTTTTCTTATAATAATAAGCAAAATCACGACGCCAATATCCAGATTTCGCG
TTATCAATACACAACACGATTTTAGTGTATCCAAGCGTTTTTGCTTTTTTGACATTAAACTTAATTGAGT
TCAATATCAAATGACGAACCATTGATAAATTAATTTTTTCTTTATCTGGGAAGTTTACTAAAGCAGTTGA
AAGCGCAATTTGACTAAAGTCAATAAAGCAAATTCCCTCTTTGTAATCTTCATCCAGCATCATTTCTAAA
TCCATATGAACCCCGTTCAATTAGTGAGATTTCTATTATATACCATCCAAATCTTAAAGTAAACAAGTAT
AAATACTTATTATTGAAAACACAATAGGAGCCCGGGAGAATGGCCGAGATTAAAAGAAAGTTCAGAGCAG
AAGATGGTCTGGACGCAGGTGGTGATAAAATAATCAACGTAGCTTTAGCTGATCGTGCCGTAGGAACTGA
CGGTGTTAACGTTGATTACTTAATTCAAGAAAATACAGTTCAACAATATGATCCAACTCGTGGATATTTA
AAAGATTTTGTAATCATTTATGATAACCGCTTTTGGGCTGCTATAAATGATATTCCAAAACCAGCAGGAG
CTTTTAATAGCGGACGCTGGAGAGCATTACGTACCGATGCAAACTGGATTACGGTTTCATCCGGTTCATA
TCAATTAAAATCCGGTGAAGCAATTTCGGTTAATACTGCAGCTGGAAATGACATCACGTTTACTTTACCA
TCTTCTCCAATTGATGGTGATACTATCGTTCTCCAAGATATTGGAGGAAAACCCGGAGTTAACCAAGTTT
TAATTGTAGCTCCAGTGCAAAGTATTGTAAACTTTAGAGGTGAACAAGTACGTTCAGTACTAATGACTCA
TCCAAAGTCACAGCTAGTTTTAATTTTTAGTAATCGTCTGTGGCAAATGTATGTTGCTGATTATAGTAGA
GAAGCTGTAATTGTAACACCAGCGAATACTTATCAAGCACAATCAAACGATTTTATCGTGCATAGATTTA
CTTCTGCCGCACCGATAAATATTAAACTTCCGAGATTTGCTAATCACGGAGATATTATTAATTTCGTTGA
TTTAGATAAACTAAATCCACTTTATCATACAATTGTTACTACATACGATGAAACTACTTCAATACAAGAA
GATGGAACTCATTCTATTGAAGACCGTACATCAATCGACGGTTTCTTGATGTTTGATGATAATGAGAAAT
TGTGGAGATTGTTTGACGGGGACAGTAAAGCACGTTTACGTATCATAACGACTAATTCAAACATTCTTCC
AAATGAAGAAGTTATGGTATTTGGTGCGAATAACGGAACAACTCAAACAATTGAGCTTCAGCTTCCAACT
AATATTTCTGTTGGTGATACTGTTAAAATTTCCATGAATTACATGAGAAAAGGACAAACAGTTAAAATCA
AAGCTGCTGATGAAGATAAAATTGCTTCTTCAGTTCAATTACTGCAATTCCCAAAACGCTCAGAATATCC
GCCTGAAGCTGAATGGGTAACTGTCCAAGAATTAGTTTTTAACGGTGAAACTAATTATGTTCCAGTTTTG
GAGCTTGCTTATATTGAAGATTCTGATGGAAAATACTGGGTTGTACAGCAAAACGTTCCAACCGTAGAAA
GAGTAGATTCTTTAAATGATTCTACTAGAGCAAGATTAGGCGTAATTGCTTTAGCTACACAAGCTCAAGC
TAACGTCGATTTAGAAAATTCTCCACAAAAAGAATTAGCAATTACTCCAGAAACGTTAGCTAATCGCACT
GCTACTGAAACTCGCAGAGGTATTGCAAGAATAGCAACTACTGCTCAAGTGAATCAGAACACCACATTCT
CTTTTGCTGACGATATTATCATCACTCCTAAAAAGCTGAATGAAAGAACTGCTACTGAAACTCGCAGAGG
TGTTGCTGAAATTGCTACGCAGCAAGAAACTAATACAGGTACTGATGATACTACAATCATCACTCCTAAA
AAGCTTCAAGCCCGTCAAGGTTCTGAATCATTATCTGGTATTGTAACTTTTGTATCTACTGCAGGTGCTA
CTCCAGCTTCTAGCCGTGAATTAAATGGTACGAATGTTTATAATAAAAACACTAATAATTTAGTTGTTTC
ACCTAAAGCTTTGGATCAGTATAAAGCTACTCCAACGCAGCAAGGTGCAGTAATTTTAGCAGTTGAAAGT
GAAGTAATTGCTGGAAAAAGTCAGGAAGGATGGGCGAATGCTGTTGTAACGCCAGAAACGTTACATAAAA
AGACATCAACTGATGGAAGAATTGGTTTAATTGAAATTGCTACGCAAAGTGAAGTTAATACAGGAACTGA
TTATACTCGTGCAGTCACTCCTAAAACTTTAAATGACCGTAGAGCAACTGAAAGTTTAAGTGGTATAGCT
GAAATTGCTACACAAGTTGAATTCGACGCAGGCGTCGACGATACTCGTATCTCTACACCATTAAAAATTA
AAACCAGATTTAATAGTACTGATCGTACTTCTGTTGTTGCTCTATCTGGATTAATTGAATCAGGAACTCT
CTGGGACCATTATACCCTTAATATTCTTGAAGCAAATGAGACACAACGTGGTACACTTCGTGTAGCTACA
CAAGTTGAAGCTGCTGCAGGAAAATTAGATAATGTTTTAATAACTCCTAAAAAGCTTTTAGGTACTAAAT
CTACCGAATCGCAAGAGGGTGTTATTAAAGTTGCAACTCAGTCTGAAGCTGTGGCTGGAACGTCAGCAAA
TACTGCTATATCTCCAAAAAATTTAAAATGGATTGTGCAGAGTGAACCTTCTTGGAGAGCAACTACTACG
GTAAGAGGGTTTGTTAAAACTTCGTCTGGTTCAATTACATTCGTTGGTAATGATACAGTCGGTTCTACCC
AAGATTTAGAACTTTATGAGAAAAATAATTATGCAGTATCACCATATGAATTAAACCGTGTATTAGCAAA
TTATTTGCCGTTAAAAGCAAAAGCTGTAGATAGTAATTTATTGGATGGTCTAGATTCATCCCAGTTCATT
CGTAGGGATATTGCACAGACGGTTAATGGTTCACTAACCTTAACCCAACAAACGAATCTGAGTGCCCCTC
TTGTATCATCTAGTACTGCTACGTTTGGTGGTTCAGTTTCGGCAAATAGTACATTAACTATTTCTAATAC
TGGTACGACTTCTTCTCGATTTACATTTGAGAAAGGTCCTGCTTCTGGTAGTAATGCTGATTCTGCATTG
TATGTTCGTGTATGGGGTAATAAGTACAGCGGCGGTTCTGATGTAACTCGTGCAACGATTATAGAATTCT
CTGATGCTACCGGCTCTCATTTCTATTCTCAAAGAGATACGTCAAATAATGTGTTGTTCAACATTTCAGG
TACGATGCAATCAGTCAACGCTAGCGTTCGTGGTGTTCTGAACGTTACAGGTGTCTCAACGTTTAATAGT
TCAGTTACAGCCAATGGTGAATTCATCAGTAAATCACCAAATGCTTTTAGAGCAATAAATGGAAATTACG
GATTCTTTATTCGTAATGCTGGTAATGACACCTATTTTATGCTCACTGCAGCAGGTGATCAGAGCGGTGG
ATTTAATGGATTACGTCCATTATCAATTAATAATCAATCCGGTCAGGTTACGATTGGTGAAAGCTTAATC
ATTGCCAAAGGTGCTACTATAAATTCAGGTGGTTTGACTGTTAACTCGAGAATTCGTTCTCAGGGTACTA
AAACATCTGATTTATATACCCGTGCGCCAACATCTGATACTGTAGGATTCTGGTCAATCGATATTAATGA
TTCAGCCACTTATAACCAGTTCCCGGGTTATTTTAAAATGGTTGAAAAAACTAATGAAGTGACTGGGCTT
CCATACTTAGAACGTGGCGAAGAAGTTAAATCTCCTGGTACACTGACTCAGTTTGGTAATACACTTGATT
CGCTTTACCAAGATTGGATTACTTATCCAACGACGCCAGAAGCGCGTACCACTCGCTGGACACGTACATG
GCAGAAAACCAAAAACTCTTGGTCAAGTTTTGTTCAGGTATTTGATGGTGGAAACCCTCCTCAACCTTCT
GATATTGGTGCTTTACCTTCTGATAATGCAACAATCGGAAACTTGACAATAAGGGATTTCTTAAGGATTG
GTAATGTCCGCATTATTCCAGACCCTGTGAATAAATCTGTTAAATTCGAGTGGATTGAATAAGAGGTATT
ATGGAAAAATTTATGGCTAAGTTTGGACAAGGATACGTCCAAACGCCATTTTTATCGGAAAGCAATTCAG
TACGATTTAAATTAAGCATAGCGGGATCTTGCCCGCTTTCTACAGCAGGACCATACGTTAAATTTCAAGA
TAATCCTGTAGGAAGTCAAACATTTAGCGCAGGTCTTCATTTAAGAGTTTTTGACCCTTCCACCGGAGCA
TTAGTTGATAGTAAGTCATATGCTTTTTCGACTTCAAATGATACTACATCAGCTGCTTTTGTTAGCTTCA
TGAATTCTTTGACAAATAATAGAATTGTTGCTATATTAACTAACGGAAAGGTTAATTTTCCTCCTGAAGT
AGTATCTTGGTTAAGAACTGCAGGAACGTCTGCTTTTCCATCTGATTCTATATTGTCAAGATTCGACGTA
TCATATGCTGCTTTTTATACTTCTTCTAAAAGAGCTATTGCATTAGAGCATGTTAAACTGAGTAATAGAA
AAAGCACAGATGATTATCAAACTATTTTAGATGTCGTATTTGACAGTTTAGAAGATGTTGGAGCTACCGG
GTTTCCAAGAAGAACGTATGAAAGCGTTGAGCAATTTATGTCAGCGGTTGGTGGAACTAATAACGAAATC
GCGCGTTTACCAACTTCGGCTGCTATAAGTAAATTATCTGATTATAATTTAATTCCTGGTGATGTTCTTT
ATCTTAAAACACAGCTATACGCCGATGCCGATTTACTTGCTCTTGGAACTACGAATATATCCATTCGATT
TTATAATGCATCAAATGGATATATTTCCTCGACACAAGCTGAATTTACCGGGCAAGCTGGTGTTTGGGAA
TTAAAAGAAGATTATGTAGTTGTTCCAGAAAATGCAGTAGGATTTACGATATATGCACAAAGAACTGCAC
AAGCTGGTCAAGGTGGAATGAGGAACTTAAGCTTTTCTGAGGTATCAAGAAATGGTAGTATTTCGAAACC
CGCTGAATTTGGTGTCAATGGTATTCGAGTTAATTATGTCTGTGAATCTGCTTCACCTCCGGATATAATG
GTACTTCCTACACAAGCATCGTCTAAAACTGGTAAAGTGTTTGGGCAAGAATTTAGAGAAGTATAAATTG
AGGGAGCCTTCGGGTTCCCTTTTTCTTTATAAATACTATTAAAATAAAGGGGCATACAATGGCTGATTTA
AAAGTAGGTTCAACAACTGGAGGCTCTGTCATTTGGCATCAAGGAAATTTTCCATTGAATCCAGCCGGTG
ACGATGTACTCTATAAATCATTTAAAATATATTCAGAATACAATAAACCACAAGCTGCTGATAACGATTT
CGTTTCTAAAGCTAATGGCGGTACTTATCTAAACCGAGTTATCTTTAACCGGGGTATTCAAGTCCCGGGA
GCCGGCAATGGTCTGACCGGGATGTTTGTTGGGCCAGGTGATGGAGCAACTTATGATAATGTTAACCTTG
ATATAATATCTTGGTATGGTATCGGATTTAAATCATCTCAAGGAACAGGACCCAGGACAATTGTTTTTAA
CGTTCGTGACGGTGAAATTTCGGCCCGTGGTAATATAAATTCACAGCGTCAGGTGCGAGCCGAAGCCGCA
GCGCCCATTGCCGCGAATGACCTTACTAGAAAGGACTATGTTGATGGAGCAATAAATACTGTTACAGCAA
ATGCGAACTCTAGAGTGTTGCGTTCTGGCGATACTATGACAGGTAATTTAACCGCGCCAAACTTTTTCTC
GCAGAATCCCGCATCTCAACCTTCACATGTTCCACGATTTGACCAAATCGTAATTAAGGATTCTGTTCAA
GATTTCGGCTATTATTAAGAGGACTTATGGCTACTTTAAAACAAATACAATTTAAAAGAAGCAAAACCGC
AGGTGCACGTCCTGCTGCTTCAGTATTAGCCGAAGGTGAATTGGCTATAAACTTAAAAGATAGAACAATT
TTTACTAAAGATGATTCAGGAAATATCATTGATTTAAGCATTTCTGCTGGTGGTAATATCAGTGGAAATA
TCACTCAAACTGGTGATTATACACAGACTGGAAAATTTAATTTAATTGGTCCGCAAATTGTAGCAAGCGG
TGGATATATTGAGTTTAATTATCGTACTACTGGAAGTGGGGCTTGGTCCGGTCAACATACTGCGAAAGCT
CCAATTTTTGTAGATTTAAGCTCAGCTACTTCCACATCTGAATATAATCCTATAATTAAACAGCGCTTTA
AAGATGGAACTTTTTCATTAGGTACTTTAGTTTCTGAAGGTTCGTTGAAGATTCATTATATCAATGAATC
TGGCGATTCGAAATATTGGACGTTTCGACGTGACGGCGGATTTACTGTTGACGGTGGAGGTTTAGGAGTA
TCAGGAGGTAGTATAACTACATCTGGAAATATTGCAGCTCTCGGAAATATTACTTCGCCTCAGATTAATA
CTAAAAATATTATTTTAGATACAAAAGCATTTGGACAATACGATTCGCAATCATTAGTTCAATATGTTTA
TCCTGGAACAGGTGAAGAAAATGGTATAAACTATCTTCGTAAAGTTCGAGCTAAATCAGGCGGAACCATT
TACCATGAAATCGCTTCAGCTCAAACCGGTAAAAATGATGAAATTTCTTGGTGGACCGGAAATACACTTA
CTACTAAATTAATGGGTCTTCGTAATGATGGCGCAATGGTATTACGTCGTTCACTTGCTATTGGCACAAT
TACTGCTGACGAAAATACCAATAACTACGGCTCTCCTACTCCAATGGGAGAAAGATATATTGCTTTGGGC
GATGCTGCCACTGGTTTAAAATACATTAAGCAGGGCGTTTATGATTTAGTAGGTAATTGGAATTCTGTTG
CTTCTATTACTCCTGATAGTTTCCGTAGTACTCGTAAAGCATTATTTGGACGTTCAGAAGACCAAGGCGG
AACCTGGACAATGCCTGGAACGAACGCTGCTCTCTTGTCTGTTCAAACTCAGGCAGATGTGAATAACGCA
GGTGATGGACAAACTCATATCGGTTATAACTCCGGCGGGAAAATGTCCCACTATTTCCGCGGTAAAGGCC
AAACTAATATTAATACTCAAAAAGGCATGGAAGTTAACCCTGGTATTTTAAAATTGGTAACTGACTCTAA
TAACGTACAGTTTTATGCTAATGGAACAGTATCTTCAATACAAAGAATTAAATTTGATAACGGATTAGTT
CTTACTGGTGCTAGACCCGACGGTATTCAACTTGACGCTCCTACAGCAGCAGATGGCACTAAAACTATAC
TGTGGGCTGGTGGTACTCGCGCAGGTCAGAATAAAAGTTATGTATCTATTAAAGCGTGGGGTAATTCATT
TAACGCATCTGGCGATCGTGCTCGTGAAACGGTTTTTGAGGTAGGTGATGGGCAAGGTTTCCATTTTTAT
TCTCAACGTGTAGCTCCTGCGCCTGGTTCGACTGTCGGGCCTATTCAACTCCGAGTTAATGGTGGTTTAT
TAACTGCAGGTAGTATTGTTGCTTCTGGTTCTATTACAACTGAATCTTCTTTAAATGTTAATAATGGATT
GTCTGTAAATGGACAAGCTAAATTTGGTGGAACAGCAAACGCACTGAGAATTTGGAACGCTGAATACGGT
GTTATTTTCCGTCGTTCTGAAAGTAACTTTTATATTATTCCAACCAATCAAAATGAAGGCGAAAGTGGAG
ACATTCACAGCTCTTTAAGACCCGTGAGAATAGGATTAAACGATGGTGCGGTTGGATTAGGAAGAGATTC
TTTTATAGTAGATCAAAATAATGCTTTAACTACGATAAACAGTAACTCTCGCATTAATGCCAACTTTAGA
ATGCAATTGGGGCAGTCGACATATATTGATGCAGAATGTACTGATACTGTTCGACCAGCTGGTGCAGGTT
CATTTGTCTCGCAAAATAATGAAAACGTTCGTGCTCCATTCTATATGAATATTAATCGTACAGATACAAG
TACTTACGTTCCTATTTTAAAACAACGTTATGTTCAAGGAAATAGCTGTTATTCTTTAGGTACATTAATT
AGTACGGGTGATTTTAGAATTCATTATCATGAAGGTGGTGATAATGGTTCAACAGGTCCACAAAAGGCGG
ATTTAGCATGGCAATTTAGACGTGATGGCTCGTTCCGTTCACCTAATAAAATTGAAATTAATGCCGTTAC
AATTGGTACTGATGGCAACATCACAGGTGGTACTGGTAATTTTGCCAACTTAAATACCACGTTAAATCGT
AAAACGACTGTGGGAGGTTGGGCTGGTAGTTCCGTTGTTGGATGGTACAAATTTGCTACAGTAACAATTC
CTCAGAGTACTGGCACAGTAACTTTTAAAATTTCCGGTGGAGCTGGTTTTAATTTTAAAAGCTATAACCA
AGCTTCTATTGCTGAGATAGTTCTTCGCACAGGTAATAATCCTAAAGGCATAAACGCTGTACTATGGAAC
AGGTCAGACCTGAGTTTTAATCAGATAGCTACTATGAATACATCTGATGATACTTATGATGTATACGTAT
TCTGTGAAGGTTATACAAACGCATTGATAGTTGAATATTCATGTAGTGAAAACTCTTCAGTAACTGTAGT
CGGTCTTAACGGAGGCATTCAACCAGTTGTTGATGCATTGCCTGAGGGACATGTTGTAGGTAAAACAGTT
CGTCTGTTAAATAATATTGGCGGAACTTTCGCAGCTGGCGAATCTGACATTGTTACTCGTGGTGAATACG
TTGCTGATAATCAAAAAGGCATGCGTATTAAATCTAACGGTAATAATATCGGTTCTAATGCTGCTATACT
TCGAAATGACGGCGGAAGTTTTTATATTTTAGCTACAGATAAAAATACAGCAGAAAAATCCGATGCAGCT
AATGGTGATTGGAATGGCTTAAGACCTTTCGCCATTAATATGGCTGATGGTCGCGTTGGTATGAACCATG
GTCTAAATATTACCGGCGGTGGCTTGAATGTTACTGGTGGCTTGAATGTTACTAGTGGTAATACTAGTTT
AGGTAATATTTCGTCTCGTGTGGTGGCTCGTTGGCGAGGAGCGTCCGGTTGGGCTGATAACTCGGATACA
ATGAAATCTAAAATCACCTTTATGGCAGACCATGGGGATTTATCTAATTCAGACAGTTATTATCCTATTG
TAGGCGCATACAGCAACTATGGTTCAGCGGGTTATCGTCAAACCTTTGAGTTCGGATGGGTCGGTTCCGG
CACTACAGCGGGTTGGCGCGATGGTATTATTCGTATTCGCGGAGATAATGCTAATGGCCAGCAAGCAAGA
TGGCGCTTTACAATGGACGGTACTTTAGATTGCCCTGGTAAAGTACTGCTACCACAAACAGGTGCCTTTG
GTGTCAATACATCAAATGGTCTCGGTGGAAATAGTATAACATTTGGTGATAGCGATACTGGTATTAAGCA
AAATGGCGATGGATTATTAGACATATATGCGAACAGCGTACAAGTATTCCGTTTCCAAAACGGTGATTTG
TACTCATACAAAAATATAAATGCTCCAAACGTTTATATTCGTTCTGATATTCGTTTAAAATCCAACTTCA
AACCTATCGAAAATGCGCTTGATAAAGTTGAAAAACTTAACGGTGTCATTTACGATAAAGCTGAATACAT
CGGTGGAGAGGCAATTGAAACTGAAGCGGGTATTGTGGCTCAAACGTTACAAGACGTTTTACCAGAAGCT
GTCCGTGAAACAGAAGACAGCAAGGGTAATAAAATACTCACTGTTTCTTCTCAAGCCCAGATTGCTCTTC
TAGTTGAAGCTGTGAAAACACTTTCTGCTCGTGTAAAAGAACTTGAATCTAAACTTATGTAAAAGAGGGC
TTCGGCCCTCTAAGGATTTTTAATGGCAATTGTAGGTGTTCCTGGCTGGATTGGAGAATCTGCCGTGAAT
GAAACTGGACAACGCTGGATGGATGCTGCGATGAGAGCTGTTCATGTTTCAGTTCCCGGCTGGATGAGCT
CAATGGCAGGACAATCAAAAGAAATTTATCTATCTATAGGGGCTAACCATAATTATGATAGAAACTCCCT
TATTAACTGGATGAGGGCTCAAGGTGGTGCGCCCGTGGTTATTACAATCACTGGTGACTTAGTATCAAAC
AGCACAGGTAACGCTTGTTTGGAATTTCCTAGTGACCTTCCTAACGCGTATATTCAACTTATCATTAATA
GCGGTGTGACTGTTTATGGCCGAGGAGGTAATGGTTCTACTAATAGTTCGGCAGGTGGAAACGGTGGTAC
AGCTATCCATAATGCAGCCGGAACTAAACTCCGTATTCGTAATAACGGCGCTATTGCCGGTGGTGGCGGT
GGTGGCGGTGCCGCATCATTGAAAAATAGCTATCCAACTAATGGTAGCTGCGGTGGTGGCGGCGGTAGAC
CATTTGGCGTAGGTGGCAAAATAGGCTCTGACTCTATATTGTCCGGTTCGAATGCGTCTTTAACAGATGC
CGGTACAGGTGGTACTACATTCCAATACGGCGCAGGTAACGGCGGTAACGTTGGAGCTGGCGGTGGACGA
GGATGGGGCAAAAATGTTTATACTTCAGAGGGTGGCGCAGCTGGTGCTGCTGTCACAGGCAATGCTCCTA
ACTGGCAAAACGTAGGAACTATTTACGGCTCAAGAGTCTAATTTTTGAATAAATATCTTAAAAGGAGGGT
CTATGGCAGCACCTAGAATATCATTTTCGCCCTCTGATATTCTGTTTGGTGTTCTAGATCGCTTGTTCAA
AGATAACGCTACCGGGAAGGTTCTTGCTTCCCGGGTAGCTGTCGTAATTCTTTTGTTTATAATGGCGATT
GTTTGGTATAGGGGAGATAGTTTCTTTGAGTACTATAAGCAATCAAAGTATGAAACATACAGTGAAATTA
TTGAAAAGGAAAGAACTGCACGCTTTGAATCTGTCATCCTGGAACAACTCCAGATAGTTCATATATCATC
TGAGGCAGACTTTAGTGCGGTGTATTCTTTCCGCCCTAAAAACTTAAACTATTTTGTTGATATTATAGCA
TACGAAGGAAAATTACCTTCAACGATAAGTGAAAAATCACTTGGAGGATATCCTGTTGATAAAACTATGG
ATGAATATGCAGTTCATTTAAATGGACGTCATTATTATTCCAGCTCAAAATTTGCTTTTTTGCCAACTAA
AAAGCCTACTCCCGAAATAAACTACATGTACAGTTGTCCATATTTTAATTTGGATAATATCTATGCTGGA
ACAATAACCATGTACTGGTATAGAAATGATCATATAAGTAATGACCGCCTTGAATCAATATGTTCTCAGG
CGGCCAGAATATTAGGAAGGGCTAAATAATTATTTGTTTGTATACATCTCTAGATATCGATATACACCCT
CAAAACCCTCGTTGAATTCGTCGATGAGGGTTTTCTTATCTTCTTGAGTTAATTCAGAAACAATTTTACG
GAATGAATTCTGATTTAACTTTCTACCTTCATGCGTTACTCCAATCTCATTCAGAAATGCAATAAAATTA
GCACGATTCTCAACAATATCTTCTCTGGAAAATTTAATCAAAATAGACGCAACAGTAATAATTTCACGAA
CTGTATCAATATTTTTATTCATTAACTATACCACTCAATTAGTTGACTTTGTTAATATCATCAGACGCTT
GATTTGTAAACTGGTCTGTGTTATTTTCTTCAAAAATTTTTTCTACGAATTCCTTGAACGACTCACGTTC
CTGAGCTACATTGTGCTCGATTACATTTTCAAGATTATGACTCATTCGAAATAATCTTCAATTTCGTAAT
CATGGACATAAAACATTATAGTTTTTAATACATCATCAATACTTTTTCCTGGAGCTGGAATTACGTAAAA
ATACCCTGCTTTTGAGAGGTCTTTATAAGTTCCAATCAAGAAATCATTATTCTCAAGATGTAACTCTTCA
ACTAATTCATTAACAATTGAGTGGTATAAATTTGGTAGAAACTTATATAGCTTTTCTAGAATATCAATTT
TGATTGTGTATTGAACCACAGATTGAGAATCAATAATCATAGACCTTCCCCTTATGTTTCTGTTTGCGAT
TAGATTCTTTAAACGCTTTCTTCTTATCCTTATGAACAGAAGCTTTATTAAAATTATGTTTTGCGACTAA
ATTGTTCATAGTGCTGAATTACCTCTCTCAAACATTTGCATGTGAATGAAAACTTTTTAGCTACACCACA
TTCAAATATATGTTCTCTTAAATCACGTGTATCGGTATATCCCATCTCAACGATAAAATGCCGTATTAGA
TTTTTATCTTTATCATTGAGAGAATTAAAATAATCGGATTTTGAATTAATTTCCCTGGCCAAATTGAATC
ACCTTCAGTTGACGTTTTAATTCTTTTATCATCTCTTCGTTCATCGCAATATAAAGATCGCGTAAAGCAG
GTTTTAACATTCCATTTACTGGAGAACTAAATGGACATACATAATCTTTTCCTACGAGCTTTTTAGTGAA
TTCAATATTACAGAACTGAAATGCCGGCTCATTGGTATAAATTCCCCAATTAGTTGACATCATTTTATTG
GCATATTCCAGTGCCTGGATTTGATTCATAATTCCATCAATTTGAAACTGTTTAATATTCATTAGTAAAG
GTCCTCAGAGTAAAGTTCTTTTTCACTACCACCACGTTCAATACGTACTTGTCCAGCGTAAGTTGCAATA
ATCATTGCTTCTTCACGTGTCCAATAATTACTATATTGGTCAATAAACCCTTGGTCATCATCACAAACTT
GTTGAGTAACTAATTGAGGTTTAACTACATCTAAAACTTCTGCCATATCTTTAGAATAATGACGAGCACC
TGGAATAATAAGAGTTCGTCCATCTTTTAATTTAAAACGATTAGCTGCACAGACAATTCGTCGTTGATAC
TTTTGGTTTTCATCCCAATATGCAGTCTGCCAACAGATTTCAGGAACTTCTTTCAGAATATCTTCTTCTG
TGCATTTATAACCATGCGCTTTAAATTTTTCAACAAGACTTTCTGGAGTTTCACGAGATAAAGGAACATT
CAGCATTTTTAAACGATTAATAAATGGGTTCATTTAAACCATCCTTTAATACGTTGCCACAAAGTTTTCT
GCTGAGCTTTGTTGACACCAATTGAACGAATAACTGGTTGAGATTCCTGGAATTCTTTATAATCGGCAAG
GTAAATTTCGTAAGCTGCATCCGTAAATGAACTTATCGCTGCCATAAAATTATTGCGAATACCTACTGGA
GCATCTTTACTTTCACGAATAATCATGTATTTACCAGTCTTAATCTTTACAATAGTTCCAAGATAAGCTA
TGGTACCAAATATCCCAACCCTCTTGAGTAGGTTCTGCACAACGACGAAGTTCATTAACAATTTCTAACT
TGTTCATTATTTATTCCTCACAGTTCAGATGCTACAGTGATTACAGCTTCAATGTTTTCTGCCGAGCGTT
TAATGTCAAGATACACATTACCGTTTTTAGCGATTTTACATGACATTCCGATGTCAGTAAATTTCTGAAT
ATGATGTTCCATCATTTTATATCCAAAAATTCGCATATTTCCATTGTTGTTAATTTCAAAATTACGAATT
CCGTGAGTGCGTTTTTCTAAAATAGCGAGATAGTTACTGCGATAAGTTTCAACCTTTTTAAGAACAAATC
CATTTTCATCTAAAAGTTTTAACATGAGGTCTTTATCTTCTTCCATATCGGAAGTAATCTCACGAGCTTT
ACGAGTTGCTCGTTTTTTCAGCAGTTCCGGAGCATTTTCTTGTGCGTATAAAGTTGCTGCATTTGAAATA
ATATCCTGAGCTTCACCAGTAATGATTAATCCATCACCAGATTTCTCCACCAGGCCTTTTTTAATCAATA
CCCCAATATTACTATTAACTACTGCGTTACCTAAATCTGGATGCACCTCACGAACTTCTGCAGCTGTAAT
GAAATCTTTCTTAGCAATGGTAATTAAAATCGCAGCAGTTTTTTCATTCAGAACATCGTTAGAAGCTTTG
ATGATGTAAGTTACTTTAGACATTTTCTAATCTCCGTAATTCTGTATCAGTAGTTGATAGTTGTATAATA
CCACAGTATGCTTTGGTTGTAAACCGTTTTGTGAAAAAAATTTTAAAATAAAAAAAGGGAGAGCCTCGGC
TCTCCCTAAAATTACTGCATGACTGTGATAACTGTCATGATAACACGTTGAATTCCGAACGCAAGAAGAC
CTCCTGCTACGGCTGGAACAACGCCTAAACCCGCCAGTAAAATGCTACCGGATACTAATGCAGCGCTTGT
AATACCTATGAATGGACTCATTTGATTTCCTCTAAATCTTTGGTGTATTCGGTAACTACATCAGTAGTTT
TCCAATATTCGTTTTCTTCTTTTTTAGCTTTAGCTTCTTCAGCAAGTTTCTTCGCTTCATCGGAAGTCAT
ATGAAAAATATTCATTCCAACTAGTTTATCAACATAAGAAGAATACATATCGATTTTCGAAAGTTCTTCG
GTCAGTTCTTTACGAGTTTTACCCTGTACAACAATTTCACCTGAAATTACTTTCTTAATGAAATGTGCTT
TGGCAAAGGCTAAACGAAAAGCTGACTCAGTTTCTTTAATTTTGTTATCAATTCGTTTTTGGACATAAGT
TTTACGAACTTCAACAAAGTCTTTAATTAAATCAACTACGTTATCGTAAACTTGCAGCTTTCCTTTCTCA
TTAATAACCGTAATATTCTGGGAACGACGTTCAATCAGTCCGAAGTCTTTCATAATTTTTGCATGGCGTT
CTTCTTCGTTATCGCTCAAAGAATATTCTTTACGGAATTTAACTTTGAATCCAAAACCATGCTCACCACA
AGCATCATCCCATGTAATGAAGCCTTTATCTTCAAGTGGGTCTAAAATTTTACTCACGTAAGTTTCACGA
TCATACTTATACGGAATCTCAGTGATATGCATTTGAGTTCGTGAAGTAAACTTATATGTTCCGCGAATTT
CATATTGACCATCAATCTCAACGACTTCACCACGAAATTCTGGGAATTCTACCTTCGGTTTAGTTACTTT
CTTTCCTTGAAGAGCTTGCAGTACAGCTTTCTTGACAGAAGAAACACTATGAGGAAGAATGTAAGTTGCA
TAACCAGTTGCAATACCGGAAACGCCATTAAGAAGAACAGTAGGAATAATAGGCAAATAGAAAGCAGGCG
GAATGTGTTCTTTATCTTGATGTACCGGAGCATATTCAGTATCTTTATATACGTTATAGAAATTTTTACT
TACACGAGCAAAAATATAACGACTTGCCGCTGCTTTTTGAACGGTACGAGAACCGAAGTTTCCTTGACCA
TCTAACAGAGGAAAGTTATTATTCCAAGTGTTAGCCATCAAAGCTCCCGCATCTTGCGCAGAGTTTTCTC
CATGGTGATATCCAAGGTCCGCTACACCACCTGCAATAGAAGCGAGTTTGTGAAACTTATCTTTATTCCC
TCGTGCCAAATCAAGAGCTCGAGCAATAACAAATCGTTGAACCGGCTTAAATCCATCAATCATATTTGGG
ATAGCACGATTTTCAACCGTGTACATAGCATAAGCCAATGCTTCATTATCAATGATACTTTTTAAATCGC
GATTATTCAGTTGCATAAATTTACCATACTAGTGAATGTAGTGCCATAATAACATCAGAAATGAAAAGCA
CGACTTGAATTAATCCGAACATTATTCCGTAATATAACGCTATCAATAAAATAGCAAGGTCTAATGAATA
GCCCAAGATTTTCTTAATCATTAGATAACAACACAAATGTTAAATATGCACACATACCCTGGGCTAAAGC
CTGCGAAAACACACTACTGGCATCGATACAGATAGTTAAAACACATGCTACTATCCAACAAATAAATTAA
ATAACTCCTAATAATTTTGCGATATTCATAGTGTTCTCCTCAACTATTTTTTAAAACCTAAAATACCAAA
GTTTTTAAGATTGTTACGATAGAACTGCATCACATGTTCGTTATGGAAATTACTCATTAATATGCCTGCA
AAACGAATTTAAAATTATCAGCCAACATACGGTTCATTTCTTCAAGTGTTTGATACTCAGAATGATGATT
ACGAGTAAACGCTAAAGCTAACTGTCCTTTTCCAAATCCCGTCGTCAGAGGTTTCATCTTAGAAGCAGGC
AGATAAAATACTGTGTATGGAACATTGTTATTTGCAATAGTACGTGCAAGCTGAGACCGACGTTGACGAA
TATGACTTAGAACTGCACTGAATCCTTGCTTAGAACGCTGATTACCTACATAAAATCGTGCAGACACGCA
TGGATTACTAAATGGACGACCATCTAATTTACTCACTAAAAAGTAAAATCCAGGTTTAGATAAAATATCT
TTATGCGGAGTTCCTAAAAACCATTCACCACCCTTAATTGTACCAATAACAGTAGCGCCTGCATTATTCA
GATCAGTAACAGTCATATATTTCATATTAATTTCCTCTAAATTATTTTCTACTCCAAGGCCGCATGAATA
CACACGGCCATTAAATTAATCGTCGCAGTCGACGCTCAATTCCCAAAACTCTTCAACAGTATAAGTTTCA
GTATCATTTTCAATACAGAAACGTTCATTACTGTTATTTGCTAAAGTAGCGTTAACTGTCATTTTCTCGC
TGGTGCTCTTAAGAGGTGAAATACGAATTAGCTGATCACCACTATCCAAGCAAAAAATTTCGCCAACTTT
TACATCTTTAAAAATTTTCATAATTCACCTCAGGGAGTATAAAACCCAAATGCAGTTGTTGACCATCCCA
TCCAATACGGAAAATTTGCACCGATGTAAAACACGAGAATATAAAACCAAATACCCAGTAAATTCATCAT
TTTACACCATTCCAAATTGTTTCAACTACGGATTTTAAACCATTTTGATGAATATCCATTCCGACTACTT
CCATCAAATAGATTCCAACTACAACTTAACCCAAGGCGAAAATCAGCATGAAAATGAATAAAGCCGGAAA
AATATTATCGAAAAACCATTCCATAAATGTAAAAGCACTGCGTTTACTCTTCATATTTTCCTCACATAAA
TCCAAAGTAAACGTTTAATACATCAATCATTAAAACGATTGGGAATATACTCAAAACTATTAGTATTATA
ACTACATTCCATATAGCTTTAACAATCTTTTTCATTTTCTGTTCCTCCGTAGTTGATAGAGTAATAATAC
CACAGAGGAACAATCTTGTAAACAACTTTTTTAAAAATATTCGTAATAAATGTGAATACCAATCACTACT
GCCGAAACTTGTGCAACCCACCACGCACAAGCAATAAGTACAGAATTAAAAATTTTCATAATAACCTCAT
CACAAAAGTAAATGTTAAACAAATTAATGGAATACTAATTAACCAAACAAAACACCACCATAATGAACTC
ATAGTTCAATCTCAACGATTTTCATTTTACTCAATAATCCGCTAAAAGATCGACGATTGCATCACGAAGA
CACTTATTCGCAATACGTTTAAGAGCAATTTCAGTTTCTGGAGCATTTTGAATAATCATTGAATTCAATT
CAGCCTCAGCAAACTGAAGTTCTTTAACTAATTCAGCTTTATATTTTCCTTGCCCTTTCTTAGCTTTTGC
TCGTTTTAGTTCAGCTGTAGTAAACATTTTATTCTCCAAATCCGTATCAGTTGATAGTTGTATATTACCA
CAGTCCTTGTGGTATGTAAACCGTTTTGTGAAAAAATTTTTAAATGGAAAGATACCATCCGTTGTAGTTG
CTTTTTCTTACAACCTTACGAAGGTCTTCTCTATCACCGATGAATTTCGGAGTGTACTGGATGACACCTG
GATGAATTTCTTTAGTGTTGAATATAATTATACAGTCAGCGACTTGATGATTTAGAATGGGCCCTAGATT
TATTCCAGAACCATATGGATACTCTCCGCTGCATCCGGTTGTTACCGAAATCCATCGTGAGTCAGTTTGA
TGTGTTTTGACTTCTACACGAAGCCCACAGTATTTTGGATGCGCCAATACATCCCATGCATATGTATATG
GGTCATTAACATCCTCTTGGCCTTTGTTAACATACCCGCTTAGCCAATCTGCTACAAAAAATTCTGCGTA
CACAGCGATACGACATCTTTCAATAACTTCTGCTTTATCCTGGTTCGGGTTTTGTTTTAAAGAGTATCTT
GCTGTATCAGCAATTTTGACCTTCATTTCACTAGTCAAGTCACTGTTCGATAGGGTAAATGTCGGAATCT
GAAATAGTCTCTGTAAACCCGGATTCGTTTTCTGCATTGAACTTTCCTTTTACGTCGGAATCACTGATAT
TCATATAAATCATAATTTCTCTTAAAACAAAAGGGCCGAAGCCCTTATTTTATTTGAATTGCGCAATTCT
TTTCTCTAGACACTCAGCATAAGATTTCATTGAGATAAACTGCGAAAGTAGCAGTTCTTGCTCAACTGCA
CTAACCGTTAGAAACTTTGTGCTTTCTAAAAATTTACTCAGTGCATTAATTTTGAGCATTAATTGATCGT
ATTCTTCTTTTACTCGTGCTTGATAACCTAACATAATTTTCCTTAATATGATAAGGGCCGAAGCCCTTAT
TTAAATTGTTCAGTAACGTCTTCAACTACTTCGTATTGGCAGGTACGCATTTTAGCATCGTTGTAATCAA
TCGGAATTGATACTACATCACGCGGATGTACTTTAACTTTTACAACTCGACTGGTTGAACTGCCAAAGTG
ACGAATATAAGATTTAGAACACACATGCAGACCACGAGAACAAGTTTGTGTATCATCGTCATTCACACGA
GTACGTGGCATTTTAACTACTTTACCCGGACTGTTATCAAAGGTGTTTGAGTGACAGTCAAAGTAGTTGT
CACGAACTACTTTCCAAGCATAGAAGTAACCATCTTCGGTGATTTCAATATCGTTTGCTACCAAGAAATC
AAAGAGTCGAGATACCGCTTTTTGGCTTGGGTTTTCCAGCAGATTTTCCAAGAACGGAAAATAAAATTCA
AAGTTTTCGCCTTTTTCCATCGAGTCAAGAATACGATCAACCAAACCAGACCGCAATTCAATATTTTGAT
AGAACAAGCTTCCACCTTCAATTCGAACATCGCCGGAAATATATTTTTCAACAGCGCGACGAACATTAAT
TTTTTGCGCAGCTTCTTCCAGCTTATCCGCTACAAGCAGATTAAGAATTTCCTGAAAGTTTGAATGAGTA
TTAGGAGTTGCGTTATAAGTTACACCGTCAACAGTAATTGAAATGAATTTTTTAGATGCATTCCAAATAA
TGTCAGATTTAGCAACTGGAGCAATAACTGCATCGCTATTAACTTTAACTGTAATATCACCGCTAATAGT
AACTTTAGGGCGTTTAGCTTCTTCAGCATTTTTCAAAACACGACGGATTGTGTCAACCGATACACCTTGC
CAATCAGCCAATTCCTGTTGGGTGTAATTACCACTTGAATACAGTTTAACAATTTCAGCTTGTTCGTTTT
TGGTCAGGCATTTAATATTGTACAT
Enterobacteria phage RB69, complete genome (GenBank: AY303349.1) (SEQ ID NO: 12)
TTATTTGGCCGCTTCCACGGCCTTCATGAATTTAACGATTTGAGCGACCTGTTCTTTGGAAAGAGTACCA
CGTCGTCCCATGTATTCTGACACAATATGATAATTGGTTTCAAATTCAATAACCATTTTATCATCATTAT
CGTAAGCATTATCTTTAAGCTTATCGAAAATTTTAGCACACAATTCTAACTTCCTGTTCAGGTCTCTGTT
ATCAGCACCTGTGAATCGATTCCATCCCCAGCGATTATTTACTGTTGAGAGTTTTGCAAAGTCTTTACTG
ATTTCTTTGTTCTTAGAGCTAAAATATTTACTAAGGAAATTAAGCTCTTCATTACGAGTAATATGATTCA
AATAAGGCTGTGCTCTACGACTTGGTGATACATACTCATCATAATCCACTTTATCAATTAGCGTAATATA
GTCATTAATTGATTTTTCGAACAAACATTCTACTTCACCAAGTTTACGAACTTTCTTAACAATCTGCGGA
CGGACTACAGTGAACTCTTTAATACCTGACAAATCGGCAATACGAGTCAAGAAATTAGAATCATAGTTCA
ACCAACCTTTATCTGCGTCAAGACATTCAGCGTTAGAACGATTACGAATTACAACATAACCTTGAATCTC
ATCAGCTTTACCGGCCGGAATAAAGAGATCTTCTGATACCCAAACATCGTTTTCATTCTTAAAGAACCGA
TGAGCACTTGGGGATTTAGGACGAGGCTGCGATGAACGTTCTTTAACTTCAATCCATGGTTTAACTAATG
CAAGAATTTCAGAGGTCTTATAAAATTTAAGGCTATCACCAGCGAAAATAACCTTTAATCGTTCCAGAAG
TTTCATTGCAACTTCATCTTCCGGGTTAATGAATAATACGCTACTACCCCGTCCGGAAGGAACCTTATCA
ACGAGTGTTGATGCATCTGTGGAAGTCAAAGCATCGTTCAGAGCACGCATCATTGGTACGCGGCCTTTCA
CATCGTCAATAACAATATCAATATGCTTACGACTAATACCTAGCAGGCTATTAATTGAAATAGTTGCAGA
CGAGCTTCCGCTTTCACGAATACGACGAAGACGTGGGTCTGAAACGATATCATATACAACGCCAAGGTTG
CACCATTCAGGTCCCATTTTAAAACGTTTGTACAACTCAGAATAAGTTAGCTGTTCTTTAGAATATTTCA
GTGATTCAATATTAGAACCAGCTTTTTCCATGTATTTACGAGCAGAGTAACCAAGAGAATCTATTTCACG
GAATACATGACGTGGATATTCACAATCAATCCATTTCTTAGAATCTTCAGCAAATAATTTTGCATCAATT
TCTGCAACACGTTTATGGATATTTGCTACTGTACGTTTATCAAATGACAATGCTTCACGAGACGGGGCTA
CATCTAGTTCACCCATAGGGAATTTAATATAAGCTGTAGTGCATCGCGTCATCATCCATGTTTGTTCTTT
AATAACACTTCCGATTGGATATACAATACCACCATAAACAGCCATGATATTACCACGTTCACCCCATGGA
GCTTCCTTGGCTAAATAAACATCATCGAATTCAGGGAAGTATTTGATATCTTTAACACCACGAACTTCTG
CAATATCGCCGAGAGGACGCATAACATAAGCAATTTCGGATGCGAACTTTTCAAAATCTTCTGGGTTAAC
AGGCACAACTACTTCAACGCCGGTCCGGTCATCAGGACCCATCTTATCTACAAAGGTCGGCTTAATTTGT
GGACCTGTGTCATCTTGGTAGATTACGTAACCACGAACTTCACCATTATGATAAGAAGTAATGTTAAACG
TATCAGTATATGCTAATGGAGCTTTAGAACCGAGCCCGAATCCACCAATGAAATCGTTACTCGATGTTTT
AGTTGAAGCAAAATATGAGTTATAAATTCCTGGCTCTTCGTCATTACCTCGAATGGTGAAATCGCTCATA
CCCGGTCCAAAATCACGAACTACAAAACGTGGGTCTAAACGACCTGGAGCCTGAACAATAAACTTATCAG
TGCAACCGTTAAGAATTTGTCCATCGATACAGTTTGTAATTAATTCACGTACACAAGCCAATTCTTTGTT
TGTATAAAGGTCATTAGACAAAATCTTATAAACTTTGCTATTGCCTTGAATAGTGAATGCTGTGCTCTTA
CCGCCTGAACCAATAATCGTTTCTTTAGCCGTTTCGATAATCATGTTTTTCTCTCATCACAAGTTACGTT
TAAAAATTTCTGCCACTTCGAGAAGTTCTTCTTTAGTAGCTGTGTCGGTTTGTATTTTATATCGAATTTC
TTTAAAGCGTTCTTTAAAGGACTCTGCTGATTCGATATCAAAAAATCTTTGGATAAGCCGGAATTCCCGG
AGCACTGCTTTATCAAAAAGTTCCAAGTCCACGTTATATGTTCTCATAATATTCTCTTCAGTAGATTCCT
AGGGCGCTATTACTAAAGACCATATAATCTATCATCTTATGTGTAATAGTGCCTCAGGCTATTCAGGATT
TACGCTGTGAAGATTTTATCCCACATCGCAACAACCGCATCTCGGTTATACTTCTTCCATACTGCTTCAG
CACGTTTAACTCGAGCTTCGTATGTGTCAGTGAATTCTAATACAGCTTTTATGTAAAGCGCAACTACTTC
TTTTTTAGGAGTAGAGGAATCAATTTCTACACGCACAGTATCTGGGTCGTATTCAAATGTCGCATGAGGA
TAATCCTTAAAAACTAACTGGATTACAGGGACACCTTTAGAGATGGCTTCAATAGAACTATTCTCTACCG
TACCTGTGTCAGGACACGTATTAATAAGTGCTTTAGCTGTTTTAAGACGTTCCATAATTTCACTATGTGG
AGCATCAATAATAACAGGATATTTAGCTGGTGGTGCCCATTTACTAGGACAGTATCCTGCACCATTTTCG
CCTAGTGCTTTAATCGCTTCAAGAGCAACATCAGTACGACGCATTTTAGTGTCATAGCGTTGTGCACTAA
TAATCAGATCAGTCGCCGGAAGAACTTCAGGTTTCTCATTCAAACAAATAACCGGATAATCTTCGGCTTC
AAACAACGGATTTGCTCGCCAATAATCATAATCGATTTTGTCAGTCAGACCTGAAGTCATATAACAATAT
TTGCGTTCAAATTCACGGAAGGCTTTAGTAGGAGCATAACTCTTACCACCATTCTTATGAATTTGAATAG
TCTGGTCCCAAATTTGAACAATGCCACGAGATACCGGTTCAAATGGTGTTGCCATAAAATTCTTATGAAC
TTTAGAGAGACCTGCGTCTTTAATTGCCTGAACGGTTAGTTTAGTCGGTTCCATAGTAACAACAAAATCG
TATTCATGGATGCCGGCTAGTTCAACAATCTTACGAGCCATAGTATAACTCATACCTAGACTGAATTTAG
TCAGATGACCAACAGGATGATGATTAACCTTCCAATCACCAAATGTGTCATTATCAAAGCCAATATAATC
AATATCAGCACCGATGGACACAAGATATTTCAACACATTTAAATGTACTGCTTCAAGACCACCTTGTACA
CGGTCAGGGTTAAATGGGACTGCGCGAGATGGGATAAACATAACTTTCATAATTAAGCCTTATTAAAATT
AAAATGAAGCTCCCGAAGGAGCTTAGGACATCCATTCTTTACGAAGTTCTGAATCATCACCCATCAACAT
TTCAAAGAGTTCTTTCCAATTTTCAGGAAGTTTAACTACGTCGTACACAGGGTTCTGAATCATTTTACGA
TATTCTGACTTTTCAAGGGAGCCTAATCCCTTGATGTATCGAATACTATGCTTAGGCAGTGTATCTTTAG
CTTCTTCATACTCAGCTACAGTATAAAACCATTTTTGAGTTTTGCCAATTTGTGCAATAATTACAGGCGT
TTTAACAAAGCGAATACGTCCTTGTTCAAACAATTCAGGCCAATTACTAAAGAAAGCAAGCAAAGCCGGA
TAAATACTTCCAAGGCCGTCATGATCGGCATCGGTCATAATTGCAATATTACGATAGTTCGTATTCTCTG
CCTTTTCACCAAGAATAAGACCTGTGATAGCACAGATATCAAAGAGCTCTTTGTTCTTCATCATATCAGC
ATATGACATACCCCAGCTATTCATCACCTTACCACGTAATGGGAATCCGCCGTGTAGTTCACGGTCACGA
ACATCAATGAGATATCCAATTGCCGAATCACCTTCTGTTAAGAACAATGTCGTATCTGCATCTTTACCGC
ATTGGTTAGCTTTAATATGCTTATGAACCTTAGCTTTAGTTGCCTTTTTAGCTGCTTTAGTTTCTGCAGC
CTTTTCTGCTGCCAATTTACGAGCTAATGCTGCTTCAACAATAGGCATAATCAAGGCTTCGTTTTTAAGA
AGTGCCTGAGCAATTTTCTTAGCATCTAATTGGATATGATTACGAATATCACCATACGTTGACGTTAAAC
GTTCTTTAGTCTGAGAATCAAAACGCATGTTGCTCATATCTCTAATAAACATCAACATTGTGAGACATTC
TTTAACACGAGCTTTAGTGACTTCAATACCCTTATATTTCTTTTTAATACCAGGCAAAAGATGTTCGCAG
ATATCATCCATTACACATTCAACATGATGACCACCATTTTTAGTATGGATGTTATTCACATAAGTTAAAT
GACGGAAGCCATCTGGTGATGTTGTGAATGCTATAGAGACTTTATCATTTTCTTGAATGATGTTATCTTC
GCCAAATTGTTTAGCAAATCGTTTAAAATTACCATCAACCTTTTTACCATTAAATGTGAACTTGATATCA
GGATAAACGACTGCCAATGTTTGAAGTCGGTCTAAAGTAATATCTAAATAAATTTGAGATAAATTATGCT
CTTCAAATGAAGTGAAATCAGGAGTGAAGATTACTTTAGTTCCTTTACCTTTAGATTTCTTAGAAGACCA
TGATTTGTTTTCCATTCCGTTTGAACAGTTAACAGTGATTTCATTTTCGCCATCTGACGTGATGCCTGTA
AACAACGTAGAGAAGATATTAGTTAAACTACTCCCGACGCCGTTCATACCACCGGTCTTGCGTTCAGAGT
CATCGCCAAAGTTACCACCAGCCTTTGGAATAGTCCAGGCTGCTACAGGCCCAGGAATTTGTTCACCCGT
TTGGTCGGTAACTAAACCTTGAGGAATACCACGTCCGTTATCTTCCACCGAAACTTGATTATTTTTAATT
TGCACATCAATTTTATTTGCAAACTTAAATGATGTACGAATAGCTTCATCAACCGAGTTGTCAATAATCT
CATCGATTAATTTAACCAGACCAAGGAACATTTCAACTGGTGAATAATTACCAACCAAAAACGGCTCGTG
GGCTTCTTTAGCAGAAAGAACCAATATACATACCATACGGTTTCTTAATAATGGTTCTACATCTGACAAT
ACCCTAATTTCATTTTTAATCATGTTGTCTCCTCGTTATGAAGGTATTCTATCATCCGAAATCTAAAGCA
AAAAGGGCCGAAGCCCTTATTTAAATTTAATTTTCTGAAGTGCATCAATTGCAGCCAAACGCCCTTGTTC
ACTTTTAACTGTAATGACCACATCGCCTGATACGATCACCGAACCATCAACAAATTCTATAGAGCCTTTT
TTGAAATCGACAGCTGTATCTGGTTCCGGAACTTCTTCAAAGAATTTAAATTCTGCACCATAAAGCAGAA
TATCACCTTGCATACTAATGATTGTACGTCCAGGTCCATCGGTTTCAGCGGCAATCATTGAAACACCGTA
ACCAATCATCTCTTCTACAATAAAATCTCTTGATAATAAAACTGTATGCAGAGTAGTGTTAAGACGTTTA
CCAGTTGTATTAAGAATTCTCAAGAAATTATCTTCTTGACCTTTGATAATACGATATTTCTTACCAACTT
CAAAACCTTTAAAAGCCATAATTAACCCTTCTTAAGTAAGTCGTAAAAACCACCGTTCACATGTTTAGGA
GCAGAAACCCGACGAGTAGACAGACGATGACATTCAGGGCAAACATCGTTTTCTCGTTCAGAAATTCTTT
TAATTTTTTCATATTCATGACCACAATCTTCAGATTGGCATTTATAGTCGTATAACGGCATTATTATTCC
TTAAAATATGCTTTCAACATTCGATACAAAGACCACGCCTGGTCGTTATTTTCGATAGTAATCGTCATCA
CAGGAAATTCAGACAATTCGTCAAGTTCACCAGAATCTTGCTCTTCGGACGCTTGATATGGATTTCCAAC
TTCGTCAAAGAACTCTGCTTCATTCGTGGAGAGCCAGATAAAGTTTTCATCAAGGATATCACCGCCTGTT
GCGTATCCAACCATGCCAGTAGATGTCACAATTTTAGTAGGACGTCCAAGATGGTCAACATCTAATACTT
TAAATGGTTCCATGCCAAGACGTCGTGCGTAAATCCCATTATCAGTGTGGTCTTTAATAAACTCTTCTTG
GGCACGTTTATCTTTAAATTGGTACCATGAGTTAACGCTGAATTTATTAGCCATTAGTAAGTTTCCTTCC
AATAAGTTGTACCATTTTCAGTGATTTCACGGAAGATACCATAGATAGGCATTTCATCACCGAGTTTTTC
GTAAACATAAACCACTTCAGTGTAGCATAAAAATTCAGTCCAGTTTTTCTGTACAACAACTAAATCAGGA
TTAAACAGAACATCTTCAAACTCGTCACGATTCGATTCAGTGGTTACATTTTTAATAATTTGACGTTTCA
TAATATTCTCCTCTTGTTTTGATAGGTCTATAGTATCATAGACCATAGTTGTTGTACATCATTTTAGCAA
AATAAAATCAACTTGTTCTGCTAACGAACGTCTGAACATTAATTGACAACTTCCGAGTATGAAATCAAGT
GCTTCATAGACCGCGATGTAGTATCCTTTAGCTTTGAAGAGTTCAACATCCACCTGGTCATCAAACCATG
CATAAACCGCGTCAACACTTTCAAATCCAAAATAGAACTCTTGAGCCCAATCTTCGTTCAATTCAAATGT
GTGCTCAATTCTATAGTATCTTAAGATATTTTGTTCAAGGAGTTTGTCTTCATTTACTGTAGGACGATTA
GGGACATTATAGTTGTCGCCGTGATGGTAGAAGTTACCTGAGATTATTCCATGTTTATCAAGGAATTCCC
ATGTTTCTTCAGAGTTGTCAGTGCCAGACCAACCGTAAGGTGAGCGAGGTTCTTTATTCCAAGAGGTTTC
CCAAATTCTGACGGCTTTACCGTCTTCGATAGCAATTCCTGGTAATGATTCACGTTGAGTACAAAAACTA
CGTTCTACGCGGTAAACTAACATATTATTCTCCTCTGGTTGATATGGGTTATAATATCAAAACCAGAGGA
GAAGTAAACAACTTTATGCGAAAGCAGCTGGGCTATATTTTTTAATTTGGAATTCAGGAACTACCATGAA
CTGTCCAGCGAAAACGATGTTATAAAGCTTAACACCATCTTCTACCCAACGGTCGCTAATAAAACCAGCA
ATTTGCTTAGTTTTCCATGGCGTTCCATCAGTTGCCGCAGCAATAGTGAATTCATGGTCTTTTTCAACAG
AAACTGATCTGCATAGTCCCCATTTGAACGCTTTTTCTTCTGGTTCAATGAATTGGCTTTTAACGTAACC
AATGTTACCATCGGCGTCACGAACTTTAACTTCATTACGTCCAAAAACCGGATCGCTCACAGAAAGAACT
TCAACCAACTTCCCGGCAACTTTAGAGCGAGAAGCATCTGATACGTGTACATAATCACCAATAGAGAGAT
TTGCAATATTCATAATAATTCCTTAAGCTTTACGAGGAGACACATAGCGAGTGATTTCAGATTCTTTAAC
AACTCGGAAGTCACCTAAGAATACGATATTGTATAACTTTTCACCATCTTCAACCCATTGGTCGCTAATG
AAGCCACACATGGTATCAGTTGTGCTTGGATAACCGTATTCGTCGATGTAATCAAATTCTTTATCGGTAA
TAAATTCAACACCTTTGCAAAGGGCCCATTTAAACTGTACATTAGGTTCAGTAGAAGCAAAATGAGCGCT
CACAGGAGTTTCCAAAAATTTAGGACTTACGTAAGCGTACCGAGTTTCAGTTTTCCCAGAACTAGGAATG
ATTCGAACTTTAACTTCTTTAACACGACCAGTACCATTAGTACGAAGTCCTACCACTTCAACTAGACGAC
CTGCAGCTTTAGAACGAGATGCAGTTGATACACGCTTAATTTCACCAATAGTAATCATAATTTTTCTCTC
TTTGTTGTTAAGATTTATACTCCATCCGTCCTTGGATGTACAACATTAATTAAGGATATTAACCACAGCA
CTACGTGGAACTACACTAAAATCACCTGCATGAACAACGTTCAGAAGTTCAACAACCGTCTTCAATCCAC
TGATCAGTTACCCATCCACTCACTGGACCTGCGAAACGGACGTCGAATTGAAACAGCTTTACACAACAAA
TCAGTAGGCTCAATAGGCTTAATCAGAGTACCGTATATACAAGCGATATCCATATCAATACAGATGTCTT
TAACGGGTTCTACTTCTTCAATCAACAGTTCAAAGTCTGTGCTTGGAAGGGCGGTAGTAGAAATTGTACC
ATATGAATTTTTAATTTCTAAGAATAACCAAGGGCCTTCAGCTTGTTTGATGAAGTTAACAATAGTGAAA
CTATTACCTTGAGTGGCGCCTAAAATTTCACAAAACTTTTCATAAGCTCGCACTGAAGCACCGTACCAGT
TAATTTGTTTTTCGTCTTTCAGGATGTAAGTAGCCGTAGTATTGATATTCATAATGTTTTCCTGTTTGGT
ATAAGATAGAAAGATTATACTCCAACCATCCTTGGTTGTAAACTGTTTTATCGCTGTTTTACACTTAACG
GGTCAGGATTCTCAGGGACATCTTCAAGGCCAAGCGCATAACGCTGAGCATATTTTAACATCAAAATATC
TTTAGCACAATCATGAATACTATCATGGGCAACGAATCCTTTTAGCGTACCCATCGGTAATGGACACATA
CTTAATCCTCGTGTCAACGAGTAAGCTTCGATTGCTGTACGAATATCGCGTTGAGCCCAGAATTTAACCG
GTTCTAATTTATCGGTATCAATCTCTGGTTCAAGAACACCTTCATCACGATAGAGGTCACGAATCAAATC
GACCAAGATCGGGAAGTCAAAGCTCATACCACGGCACCACATCTGTGATTTCCATTGGTCAACTTTATTA
GCTCGACAATAATCTAAAAAGATTTTAATGCCTTCAAGCGTAGTGACATCGTCTTCAGACGGGGCCAAGT
TTTTACGTGCTTCAGCCGATTGTTCTTTCCACCATTTCATAGTGGATTTAGCGAAAACTCGCTTCCCTTT
CTGAGAAGCTAAATTAAATTTAATTCGCTTACCTCGTTGAACAAGTTCTTCAAATGATTCAACAACTTCA
GGGTCGGAATTATATGCAATAACCGCAAGGTCAATAACAGCCGCTTTTGATGTATTGCCGAATGTTTCAA
AATCTATAATAACATCAGTGCTCATAATTTTCTCTCAAATAAAATGGACGTCAAAACGACCACGAGTTGT
GCCGACATACAATAACTGTTTAGCTAATTCTGAATCAGCATAATGGATACACGGTGTATAAACAAAGGCC
GTGTCAACAGACATACCCTGGGCCTTATGGAAGGTTGATACTGGTAGTGCCTTCACCTTAGTGAACATAC
GTTTAGCATCCCAGAATTCGCTCCATGGAGCTTTACCACCTTTATTCCAGAATTTGTATGTTTCTGCGGT
CTTAGCCAAAAACAAATTGAATTTATAAAGCTCTTCTTCGGAAGAAATAACCTTTATATCCTCGCGGATG
TATTCTTCATCATCCCCATATGTTTCTACTGTAAGATTCCAATATCGTATCATATACTCGCCCGAAACAC
CACGTGCTTTAACGAATGTAGACGTTTCTACAGCATCTCGAATACGAACGAATTGCCCGTTATTGAAAAG
CATTTCGGTCATATTTTTACCATCTAGCTTGTACGTCTTAGTAAATGGCTCTTGTAGAACAATGACTTCG
TCTTTAATAAATGGTTTTTCTGTTTCAAGAAGTTTTCGGCGAATAATTGAATTTAACTTGTCCACTGACT
TATTTGTGAATGCCATCATCCGATTTTCGAAAAGGTCTTCAGGAGTTTTAACGACATTAAAATAATTCAT
CATATATGATTTAAGGTCGGTATATCCATGAACACCATGCCCGTCAACTACTTTATCATAAATCCATTTG
CCATTACGAATATCGGTCGCAACATCAATAATTGGTGCATTGCTACGTTTAACTTCTGTAAGGTCGCATT
GCACGAAGTCTTTGTGAGTGAAGAAAGGACTTAGATATGCAGTGGATTCGCCTGGGTCTACCGGTCGAAT
CTGACATCGGTCGCCAATTCCAATTACTGTGCACCATTTAGGGATACTAGCTAACATTATTTTAAACAGA
GAACGGTCGCACATTGACGCTTCATCAAATAACAGTACACGACACAAGGCTAAGTCGGGAACCTTTTTCT
GTTCAAACAATACGTTTTCTTCGTATGTAGTTGGGTTGATTTTAAGAATGCTATGAATAGTCGATGCTTC
TTGACCAGCAAGTTTGCTTAGAACCTTTTTAGCGGCATGTGTTGGTGCTGCTAAAATAATACCTGATTCT
CCAGAAGAAATAAGAGCTTCAACGATAAATCTAGTAAGGGTTGTTTTACCTGTACCGGCAGGCCCATTAA
TAGTTACGTGATGTTTCTTTTCTTTAATAGCTTTCATAACAACGTTGAAGGCGTTTTTCTGGCCTTCAGT
CAAATCATCAAATGTCATCGTAAAGTCCCTGCAATTGGAATACTAACAATACGGCCTGTGTCCAGGATTC
GTTGATACAATCTTTGCGTCTCCGCATCTAGTTTAACGTGTTTCATTTCAAGCTTATTAAACCAGAACTT
ACGCGGAGTTTCGACCATTCTTAGAACTCCCATTTTTAAATCTGTTTTATACTGTGTTTTCAAAGTATCG
AAAACTTTATCTGCAATATCCTTTCTAAAAAATACTGCAGGACGATGCTCATCAAGAGGAACCGGGACAG
TAAATCCTTCCATATCTCGATAAACTATTGCATATACATAAACCATAATTAACCTTTAATCAGTTGGAAT
AATGATGCGCTAAGTGGTAAGCCACGTTTCAATTTTAATTTACCAATGAAACCAATCTTTTCAAAACGTT
GCAGACCTTGGATAACTTTATCATATGTATCGAAAAGCGATTCAGCGTCAGTTAATTTAGTTTTAGTTTT
CCAGTCAGAGCCTTTAAGAAGAACGTTGAGTTTAGTAAGTTCATGGCCTTCTGCTTGATGTGAGCCATTA
ATGCGTGCTTTCAAAGCAACAATTCTAAGTTTAGATTCGTTAGATAAAGGTTGATTTTTCATCATGTTTG
CCATATGCTTAACACGGTTTTCACGTTTTGCTCGGATTTTTAAAATAGTACCATAAACCTTTTTAATTTG
GGCCCATTTCTTCTCGTCGAGATTAAGTTTCTCTACTTTACGAGCAGAAGGATTAGCGATACGTCTTGCA
ATAGCATCACGTTTCTCAATAAGTTCTTCTAATGTTAAATCAGAACGAGCCGTGTTATATTTTTTCTTAA
CTGGGATAACATTACCTTTAATGTAGCCTATATCATTATTAAAACGTTCTAAGGATAATTTCTCACCTTC
AACAGAGTTATTGAAAGATTCACCTGAGTAAGCGCAGACCTTTTGATCAAGAATGTTTTTAAGGTAATTA
AAGTCTAAGTTAAAATCCTTAGAGCGTCTCTTCGCAGAAGCTCTGGTGTGGTCAAGACGACGATTGATTT
TGTTAATTTTATTATTTGATAACATAATATTTTCCTCTGTCTTACGGACGTTAAGGTCATTTAGCTGATA
AGTCTATAATATCATGCCCTCAGGTAGTGTACACTCTTTTTTCATAAAATGCTTTAATTTTTTATGTGTT
ATAATGGTTCTGAGTTCCATCCGGTTATTCCAATTCAGTCAGTAACTGACAATAGACAGATTCCAGATTG
TATAATGTCCATCTTGAATAATAGAATCTACACGCAGTGTAGTCCCTATAGGGAGCATAAATTCACATTC
GTCAGATATAAGTCTAGCGTTAGACCGTCTTGTCGCTTCAGGGAAAGCTCCATTGAACTCACAAGATGGC
GCAGCCAGAATCATGTTAAGCATATGTTCACGGAAGTTGAAAGCAAATGGTGCATCTTTGATGCAGAACA
TATTAAATGTTCCGTAAAAATTATACGAAGCAAAGTTACGTGCTACACCGAACACTGGACTGAAGCTCAT
TACTCTGTCAAATTTAATAATACTACCAATGCCTTTATCATCAAGTGTGGCCATAGTTTTCTTAGAGATT
CCACGATACATTGTCTCAGGAACAGAAGACGACCAATTTCTACGAACAATTGCACTTAAATCTTGTTGGA
TGCTATCAGGCTTGTTTTCCATACACTGCCATAGTACACTTTGTTCAATGTCACTGAATTGCTCATCGAT
TTTGTACTGAAGCATATCTTGATAATCCGGGCATTGAGCACGACGAACCATTTCTTCAATTTCACACTCG
TTATACGGCATAAACATTTAGGTTTCTCCTATGGTTGATAAAGGTATAGTATCATCATCGGAAGAGTTTG
TACACTAAAAATTCAACATTTTCAAATGAATGATTTTGTATAATCTAGATAAAGGGTCATATTCTAAGTC
TTCAATTTCCACAATCTCAAATCTAGAGATACCTGAGACCATGTACTCTTGTTCAGATTCAATCATATCT
AGGACATCAACACGTGTTTCTTCCATAACATGCTTAGGGTTCTTTCCGGCAAGTACAATGTTAATCATGT
TTTGGTAGTAATCAAAAATGAATGGAGCATTCCTGAGACTAAGAATAGTGTACGTCTGATATTCCCATCT
CCCGGAGAATTGACGAGCTGTACTGAAATCAGTTGTGAACGATGTTACTCGTCCAGGAGACCAATGGCAT
CCAACAGAAAGAAGTGAAAGACGTTCTACTTCTTCTGGAGTTACACCACGGTAGAGTTCTACTGGTACTG
TAGAAGTCATATGCTTACGAACAAGATGGTCTAATTCATAGTGGAAATCCGGGTCTTCCTTAGAATCGGT
GCAAGCCCAGAGAATGTTTTGTTCTTGGCGGGTGAATTTGCTATCAATCAGATTTGTTAGGTATTCGCGT
TCTTGAAGTTCAGATTGACATGTCATGATAGACCTCCATTTAAAGATAAGCCTATCATAACATGAGAGGA
GGGAATGTAAACTACTTTTTAAGCTTTCCTACTAAAGGTCCATCAGGACCGGGTTGTTCTAACATGAATA
AGGACGCTTTAAAAAGCAATGTCAACCCTTTCACCATTCGATACCATGTCTCAAAGTCTTTTTCCTTGAT
TTCCAGTAAGAATTTCTCTTTCAATTTCTCTTTCATTTCCAAGGACTCCATGGTGGAGGGTCGTCATAAT
AAGAGGCAAGGTCTTTCAGGGCTTCGACAGGCAAACTAAAGCCGTGTCGTTGTATAATACTATCTAGTTC
ATCAACAAGTTCACTACGATGCACTTTAGGAGCCTCAACTTCAGGCTCGTCAAACATACTCATAAGGTCC
ATATTATTCACCTAAATAAAAACTAGGCTGCTCGGAGAATGTTTCTAGCGCTACACCTTTTGTCTTAAAA
AATTTCCAAATAGCTCGTTGCAAATGGATTAAATCTGCTAATGATGTAATAAAGTATTTTTTGGCAAAAT
ACTTATGGTCTCGCTTTTCAAACAAATCTAAACGCTTTTCTGGATTCACATAAACGGCATTTTCCGTAGA
TTCATAACCTAAGTCCTTTATGCCTTCTTCAAGACTAAACGGAGAATTTTTAGAATGAGTAATAGCTCCA
ACTCGCTCTACACGAATTTTTGTAACCTTTAGGAATCTGCAATTTGCAGAATTCTTCTACGATATATTGC
GGATTATTTAGACTTTTGTTAATGAGAATAGCTATTTCTAGTGGAGTCTTATCTTCCACTGGTATATGTT
TAAATGACTTGGCTTCAAGCAAATACATTTTAAATAACATAGCATCCATTATAATTTCCTCGATGGTTCA
CCCATATAAAGTTTTACAATACGTTCGCCTTCATCTTCGACGAGCTTTTCTTCATGTTTCTGGAGTTCTT
TGACCATTTTCTCTTCAAAAACATCTAACCAATCTTCTGGTCCGACTCCATCATTCAAGCTTTTAAACCA
TTTTACTACTCTGTTCATTCACAGCTCCCTGAGCTTGAACCACAATCAGAATAACTTGACCCAGAATCAC
CGGACCAAGACGATACGTAAGAATGATTATAACTTGAAGAGCTTGAAGCATTCGCCTGGTTTGTTTTTAG
ACGAACAACTTCTTCCATCATTCCATCACCAATATATTCCCAACTTTTTTGATGTGTATCAGGAATACGA
ATCATCCCTTCGCCGGGTTTAACAACAAACAACTTGTTGAGCATCGGAAGCATTAATTGTTGCGTCGAAC
AAAACGAACACCACCATCATCCCCAACGGATTTGGGCATTAAATTTGACGTCTTCACCATCCATCATGAA
TGAGTGTACGAGTACGTCATCATAATATCCAAGACCGTATTTCAACGAAACTTCTTGAGCAATCAAAGCA
CCTAATGTGTTATTAGGTTTAATCCAACGATTTAACATATTGTTCTCCTCTTGAGTAAGTAAGAATATCT
TAACATAGTTTTTAGTGGTTGTAAACTCTAGAAACGAAAAAAGGAATCCCGAAGGATTCCTTAAATTATT
TAACCACTTACTGGTGTAGGGGTAAACATTGCAGCGTTCTTAGTACGCCAATCTGCTGCGTCAGTCACCA
CAGTAGTGTAAGCAGCTTTTTCAGATGGGAAAGTCTGATAATGAGCATCAGCAATCCGATGTTCGTTTGA
ATAAATCTCAAACGGTACAGAAACTTCCATACCTTTAACTTCTTTACCTTCACCAGCAGGATGCGTAAAG
GTTTTGATGTTTACATAACCACCCATAATTAACTCCTTTGTTGTTTAATTACAGGTGTATTTATATCAAT
AATCGTCGTAGAAATCACTCAAAACATCGTATAGCTCTTTCTCATTATTGCAGATTAGCGACTTAATTGC
GTCAGGGTGAGACTCCAGTGCACAAAGCTATATTGGCCGCGTGATGAGAATGTTTCTCAGATTCATATCA
TCATTAGGGATGGCAATAACCAATCGGGTCTTTCTCGTAAAGGTCGTTCATTAGTAACCTCGGTCTTGGC
GAGCGAAGTTTTCAGCATTCTTCAGGTAATACAGTTTGAAGATTTCTTCAGCAGTGAGTCCAAGACCCTG
GAACATATTCAGAACAAAGTGCAGAATATCAATCATTTCGAATTTAATTTCGAGCTGGTCTTCAGGAGAC
AGTTCATCGATACGACGATTTCGATATTCAGCATGTTGTGCCTTCCACGGCTTCCACACAGAAGAGGCAG
CTTTCTCGCCGTTGCTCATACCGCCAAGTGAAGTCAGCAGTTCACGAAATTCATCATCAATATAATCTTT
CTGATTACGCAACCAATCAACAACATCGCCAGCAGTAGCCAATTCATCAGGATGTTTGTTATGTTCAGGC
TTGTCATTTGCTAAGCGAACCTGTAAAGATTTCTGCATATCAAGCATTACCTGCAGTGGGTCTTTATCTT
CGTGAATCAGAGCATTAAAATAAGCTTCTTCTGCTTTATCAACACCAGAAATAAGTTGTGAACATTCGTT
AAAGTGTGCCATTATTTTTCCTTTCAATTCAGTATAAGAGAGTTAATTCTAACATTAATTTTATAAAGCG
TAATAAATAATAGGTAACTAAGGAGATATTATGTTTAAACTTCCATCGTTAATCAACGCTATTAAAGGCA
ATAAAAAGAAAACTGCTATCGCTGCAATAGTTGTAGGTGGTATTATTTCATGGAACTTCGGGATTGCACC
ATTGTTAGTTGCCCATGGTATTATAGTTCCTTCTGTTCCATTGGATACTGTTGTTGACCTAGCTTTTGCT
GTTATAGGGCTTGTTTAAATCTTCGAATAACGAGATAATCTCATTTTAGCATGCAACCCACTTGAAATAT
TCTGTTTCATATATTCTAAAATTTCTTGTGGTGTTGCATTTTCTTTCATTACCATATCATTCACATCCTT
TGAACTCCATGGAGCTCGGTCCCAGAACATGACACGTTCGCCTGCATCAACTAATCGCTTCATGCGAGCT
ATAGTATCCGGATGCCTAGGTTCATTATCCATTACCCATACCCGACGTTCTTTAAATGGTACCACATCTA
AATCTATCGAGCCGCCTGTAATAGCGATTGCATTAGGTATGAATAAACTATCAATAGGGCCTTCCATTAC
CCAGACGTCTCCTTCCTTAACACGTTCAACACCATAAATTTTTGTTGCAGACTCAAACGCTTTAATAGTG
ATATATTTCTGAGGAGCATCTTTACGAAGTGCACGTCCTTGGAATGACTCGGCCTTCCCGTCTTTATTAA
AAATAGGAATCACTAAACGTGGTTCGGGAATCTCTTTCTTATACGTACCAGGTTGAATCTTGTTGACCAA
TTTGGGCCATTCTAATGTGAACCATAATCTGTTCCATGATTCTTTAGGAATACACCGAGACTTAACATAT
TTCACAATAGGATGCTCTTCAGGCAACTTGTCCAGACGAGAACAAGACGGCAAAGAATTTATAGTCTTTT
TCTCTGGCTCTGGCTTAGCTTCAGGAACCTTTTCAATCTTTGGTTCCATTCTAGCTTTTTCTTTACGAAC
TTCCATTAGATATTCGCGATAAAGCTCTTCATCATACTCCTTTAAGTATCCGGAAATTGTATTGTGGTAT
TGACAGTTATAGCAATGTACATTACCAGGAGTACCGCCATAATACCAACCGCGAGCTTTCATTGCATCTG
TCTGGGAGTCGCCACAAACTGGACAACGAAACGTTAATTTAAATGTGCTTGAATTATTGATTTGTCTAAA
ACGAGGGAGGTGAGAAAACGCACGATAAGCAAATTCATTATCTATCCATTCAGCCATAGTATTCTCCAGA
GGCCTTATTAATTTAAGGCCATCATATCACAACTTATTAATATTTACTTTAATTCGCTTTCTTTTCTTGG
AAGGAATTTGTTCTGGACCTTTATTTACGACTGCACCTGTAGTTGTTCCTGATGCAATAGCTTGAGGACT
GCCGCCTGAATCACCAGCAACCATATCCTCAAATAAAGGGAGTTCTTTAAATATTTCTTTCTGTTGTTCT
TCTGTAATGTTATAGCGTGAAGCTACAGCACTCCAGGCGGACATCATTGAGGCCATTCCATTAAGACCTG
GAACAGTGCTCATCATTCGCTTCATTGAACGAACTGAAGCATGAAAAGGTGTATAAGCCGCTTCTCTTCA
GGAGTGGAAGGACGTTTAAGAACACTTCCACGTTCATCGATGATTTTGGCTTCGTATGCTTTCCATTCGG
TAAAAGGTTTTTGCATTAGTCGAATAAACTTATATGCATAAACAGAATCTATTGCAGTGTTAATAATACC
CATAGGTACCTCCTGAGTATATTTAATCAATTACAAAGATTGCTTTGTCACCATTTATATCTGTGACTTC
ATATGTGGTGCCTTCATACTGTGGAATATTCCAAATTACACCGTCATTAGCTTTTACGCTAATATGGCAT
TGGTGTTTTGAAACAACTTCATAATCTTCAAAACTTGTAAAAACACTAATTTTAGAACCAGTGCAAATTG
CAGTAGTCATTTTAACCTCGATTCATAAATGCATTAAATATTTGGTCATCAACAGAAATTTCTAATTCGA
CTTCAATTGCTTCAGCCTTTTCTTCAGGTGGTAATTCGTATCCACACACTACAATTTTTTCATCGATATC
AAAATATACAGAAGCAATACGATTAATGTTATTTTCAGTTAAGTCCAAATCAACATCAACATCTTTTTGG
CTTACACTTAGAGGATAACTAATACGGGTTATTTTATTATCTTTAACAAAGAGTCCACCAACATACTCTG
TACTACGTTTGAAGTTTACACGTTTCCGAATTGAAAGATATGATGCATCTTTACCGTGAGCTCGGCTCAT
AGGACATAATGAATAGCTAGAATAAGAGATGTCAAATCCTACACCTTCAATATGAGCCAACGTGTCATGA
TTAAACCAATTATAATCATATGCCAAATCCATTATATTGTAATATGTGAAAGGCACAGGATTAACATCAT
ATGTTGTACCTTTAAAATCTGCCCAGGCAACGATTTCGTTATCTTTAACAATTACAAAAATTACACCGAT
ATGGTATCCGTTATTATTTTCATTCGGCGTTATATTATAACATTGTGCATTAGGAAATTTACCATATTTA
AATGGCGCGTTTTTGTGCATGTAATAAATCATATTATTCACCTGTGATTTCGGTTATGATATCTTTGTTA
TCGAAATTAGGGTCACAATACAAAACATAGTTGTACTGCATGATACCGCCAGACTTAAGTTGTTCAACAA
CTTTATTAACCATATTAGGACGGTCTCGTTTAGTGATGTTCATGATATCAGAGAAGATTTGTTGTTCAAC
ATCTTCTTGATTTGCAGTCATTGACCACTCACAGAGGTCTTTATCATAACCTGCCGTAACTGGAGCCGGT
GCACATGATACTGCAAGTAAGATTGCTGCCAATGATAACTTTTTCATTTTAACTCCTTAGTTGATTTGAT
AGGACTACTATACTATAGTCCATCTATAATGTAAACAAGTTTATTCTTTTTCGCGAATAATAATTACTTG
TTGAGGCTGCTGAGCCGATTTCTTTTCGGCAACGATAGACCAAATTAAAGTTCCAATCCAACCAACCATC
GTCCAGTTAAAGAGTAAAGATACAAAGAAGATTGCTGTTGTGCTTTTTGTGCCACGAATAAGTGCGATTA
CCCAAGGCAACATGTAAATGATGATTGAACCAATACCTGCGATTAAAACTGCTACTGAACTAGCTACGAA
TAATTCCATGTTAATTTCCTCTTGATTTGTTATGTTTATAGTATCTTGTTTTAACTTTGGTGTAAACCAA
TTAATTAAATTTGTTTAAACGTTCAATACACTGGACGTAGTTATTCGCGATTTGTTTCTGGGTAGGCTCT
TTACCAGTTGTTTCAACATAGCGAATGAACGCGATTTCAGTAGCCTGTAAGCAATGTTCTTTAACGCGTT
GTTCTTTTGACAATGCTACAGTATCAGAATCACGATAACGTTGAGCATGGGCATCAGCTTGAATCATTCG
ATTACCTACAGTAACCGGGTCTTCCACTTCAACTTTAGGTTGGTTGTACTGTTTAACATTCGGATTGTAA
ATCAGTTGGCCAACGTTATTAGGGATAAAGCCATGGGCACCACATCCAGTTAATCCGAATACCATTGCTA
AAGCGATTAATTTTTTCATTTCAATTTCCTCTGTAGTTGATAGAAAGATAGTAACACAGTATGTGGTGCT
TGTAAACAGCTATTTTAAACTTTTGCGAAATTTGCGTTTTTCTTGACGAATCTGTCGTTTAGTCGGACGT
ACAGCAAATTTAACGAAGTCCACTTTGCCGTGTGGAAACTTTTCAGATGCTTCACAGTCCATCATTAGTT
CCCATCCTTCCAGAATAAGAGCTTTCCATTGTGTAGTTGATGCAAATTCGTATGTTGATGGTTTAAACAC
AGTTGAATACATATTATCCTCTGAAATCAGCTTCAAAAACTTTCTCGTCATTAATAAATGCTTTAACTAA
TGCATTGTTCACTTCAGCAAGTTGTACCGTAACCCACTCGATTTCTTCGCGATCACCTGATAACATGATA
TCTTTAGTGAACATCTCACCGCTTTTAAACCAACCGATAAAAGTAACTTTAGTTAATTTGCTCATATTTC
CTCGCAAAATGCCCATTCAGCGTGATAAACTGTAGCACCTTTAGTATTATTCATTTGAACTACGTCTACC
GGAGAAATTACTCGATAGAGACGTGGTTCACCTCCATAAGAGCGTGCTGCTCGTCCTGCATAAATCTTTG
CTAAACCGATATCTTCAGTAAAGAATACACGATCCAAGTTTTTCTTACGTCCAGTTTCAGACAGAACTCC
TGTTTCCTCAGGAGGACAAAGCATGTTTTCGATGTTAGCTGAACTACTTGAACCGTGATAAAAAATCTTA
AATTCTGCTTTACAATCGATGGTTTTCATTTTGTTCTCCAGTAGGTGATAGGTCTATAATACACAACTAC
TGGAGAAGTAAACTTAAAAACGTAATTTAGATATATCTGCGTTGATTTCGTTTTGGTTTGCGTCGTATGC
AATTAAACGAACCGCTTTAGATGGGTCATTCAATGCATAGAAATGATGGAACATTGCTCGAACGATATCA
CCATTTACGAGTTCTACCTGGATAGGAGAACCTTTTTCGAGTTGGAAATGTTCATAAGCTTTGATGGTTC
GCAGATAATCAAGTTTTTGATTTCCGGCTCCAACAATTTGTACGATACGTTTGCCCATGTTTTCCATACG
AGATACAATAGTTTTAGGAGCAAGAATAACGTAGGTTGCCAGCGGAGAAACTACTTCAACAGTTGTGTTT
TCGGTGATTGCAGTAAAAATTGCTTGAGACATATTCATAATGTTTTCCTCTTGGTTGGTGTAAGTACATC
ATATCATGTCTAGAGGAAGATGTAAACCCCGAAAGGAGACCGAAGTCTCCTTTTTATTAAAATTTTAACT
CATTGGCTAAGCTATCTAGGTCAGCACGTGTTGCTTTGGCTTTACCTACGCGTTCCGTACGATTCACCTC
TGCCTGACGCATCTGAGCACCTGCGTTTTCATTTACTGTGTTAGGTGTGTTCATGCCTTCTTGCTCAATC
TCAACCCATTTCTGATTGCCTTTACGTACACCCATCAGGAATTTATTCCACTTATTCTTATCGCCGTATC
GTGATTTGATTTGCTTGATAAGTTGTTGTTCAGCTTGTGCAAGTTCTTCGGTTTCAATTACAGCCAACAT
GAAATCTGCCGTTGCTGGTAAACCTGCTGATTCTGCGATATCACTCATGTTCATGTCTGAAGCATCCCAT
GCTGCACGTCCTACTTGAGCTGCAGTCCATAGAACTGTTTCAGATTCTACTGCTAATGCACGAAGTTCTT
CTGCGATAGCTTTAACTAATGTGTAGCTATTTTCAGTGTAAACTCTGATACGACAAGACCCACAAATACC
TAAGTAATCAACCATGATTACAGATGGCACAAAGTTCTTCTTAAGTTTTAACTCATTAAGCAATGCACGG
AATGTATTAGCATTAGCTCCACCAGTAGGATACTGTTTAACTACTAAACGTCCTAATGTTGTTTTTGAAC
GCCATTTTTCCATCTTGGCTTTATATTCAGCATAAGATACGTTACCATCATCAATATCATCAAGTGATAC
GTCAAGCATGTTTGCATCTATACGCTTAGCGCAAACTTCTTCAGCCATTTCCATAGAAATATAAAGAACG
TTATGACCTGTTTGAAGATAATCTGCAGCAAGTGAACAAAGGCCTAAAGATTTACCGACGTTAACACCAG
CCATTAAAACGTTTAGTGTACCGGTTTCAGCACCACCTTTGGTTATTTTATTCAAAATGTTTAATTTGAA
CGGGACCTTACGTGCTTTATTTAGATAAGAAAGCCAGCGTGCTTCGTAGTCTTCCATCCAGTCATGTCCA
ACATAACTATCGAACGAAATTGAAAGTGCTTGACGCATAATATCAGGAATAGCTCCTACGTCAGGCATTT
TCTTGTTACGTTGTTCTGGAGGTAGTTCAGCATTAGACTGAATTTCAATGATTTTGGACGTAGCATTATA
CATCGCTTTTTGCTGGACATATTTCTCAGTTTCTTTAACCAACCATTCGTGGTCTTCAGGAGTATCAGCC
AATTTTTCAATTAGGTCTGAAGTTCCTTTATATTCGGCTTCAGTTAAAGAACTGTTATCTAAAGCCACCT
TTAATGCATTGATAGATGGCATTGCATTATATTCGTTAACGTGGCTCTTTATAATTTTAAAGACGTTTTT
TGCCGGTCCACGCTCAAAGTAATCAGAATCCATATAAGGCCAGACCTTAGAAAAATAAGCCTGGTCATAT
ACTAGATGAGACAAAATAATTTCTACCACGATAACTCCTTAAAAGAATTTAAATTTTTTCTTGGCCCGTT
CATTAAAAGCTTGTTGTACTTGCATTGTAACACATTTTTCAACATGTGGTGCAAGTTCTGCCTTTTCTGT
CCTGGTCAAGAACTGCAAAGTCCATTTCGATTTTACCATCAACCCAGTGCTAGTTTTGTAATATAGACTT
ATATGATGGGAACCGTCTTCAAGTGTAATCAGAATCTCTTGAATGACATTTTCCATTGCCGAACGGATAA
TTTTAAGAGATTCATTAAACACTCGTTCTTTGCGAATGTCTTCCCCTTCCGAAGAAGGGGATTCATCAAC
GATTTCTAGATTTAAATCATCGAGATTATTCATCGAAATCTTCCATTTCGTCAAGGTCGTTTTCTATATC
TGCTGCAGACGGAGCATCAGAAGTTTTAACCGGAACTTTAGTTGTTGCTTTGCAATTAATAAGGTCGTTA
ACAGCGTCATCAACTTCTTTAATAGAAGAGATAGCACCTAGTTTATATTTAGTTTCAATTGCATCTCGGA
AAGGTTTGTGTTTAAACAACGGTCCCCAGAATTCTACACAATCAGTAGCTTTAGCACGCCACGATTTCTC
TTCACGAATCATTTCACCTGTTTCTTCGTCAAGGAATTCACGAGCATACCACCCGGCTTTAGGCTTAACC
ACAAAACCGATTTCAGTTGCCATTTCTAACAAGCCACTGAATGGGTCGATACCACCATCAAAATTAACCG
TGATTGGGAAAGTAGATTTTTCTTTAACGGTGCGAGATTTTTCTGCTTTCAACGTGAAGTCATAACCGGT
CAATTCTGTACCTTCTTTAACCTGACGTTTAGAGATAAAAAATACCGTGTTGGCAGAATAAAGAATACCT
GTACCACCACCCATAATCTCTTTAGGATACAATCCGCCAATTTCCATTGCTGTATGGTTGATTGCAACAC
ATGGAATATCTTTAATAGTCAGATAAGGAGTCACAATGCGGAACAGAGATTTAAGTGCCTTAGCACGAGA
CATATCACCTACAACTTTCTCGTTCAATGCATCTTCAGTTTCTTTCTTAGACGCAGTATTACCAATCGAG
TCAATAAAGATAATAACTTTATCACCGCGTTCAATAGCGTCAAGCTGATTAGTCATATCAACTTTAAGTT
GTTCGACAGATTGAATCGGAGTATGAACTACACGGTCTAAATCAACACCCATTGAACGAAAATAAGATTC
TGAAGCACCGAATTCTGAGTCATAAAACAAACAGATTGCATCTTTATATTTCTTCATATACGCTGCAACC
ATAGTTAGTCCAAACAACGTTTTAAAGTGTTTAGAAGGAGCAGCAAAAATAGTTAAGCCTGATTGCAACC
CTGCATTCAGTGCACCACCTAATGCAATATTCAACATCGGAATACGAGTAGGGACTTCATCGCGATTATT
AAACAGCTTAGACTTAGTCAAGTCTGCAGTCATTTTAGAAGTAGAAGCTTTAATCAGACGAGATTTTAAA
TCAGACATTGTATTTTTCCATAGGCATCATTATATTTTACTCATGTTTAAAAGATAAGATGATTATATAC
TAAGGGTTATACAGCATTTAAAACTTTAAATGGCTCTTAACGAGCCCATTTGATGATTTCTGTAATCAAA
TCATTACGTTCGCTTGCATTAAATCCTATAACTTTGTTAGCACCATCATGATTAAGTAATTGATACGTTT
GGATTTCGTTATGAATTGCAAACTCTTCAAAATGTGAAATGACTGTATTAAAACCGAATGAAGACAAAGT
AATAAGGTCGTCTTCAAAACTTTCAGTCATTTCGTTACGTGTTAAAATAATTGTGAACACATCATGGTTT
TGGCAAAGACGAACATAATCCTGTTCATAAACGTCAAGAACCGAGTCCGCATCTTGTCGAATACGTCCAT
AAACCCAGTTACTAATATATCCACGATCTAACAGATAAATCTTAGTAGGGTCTAAATAATTCAACATCGT
TTCGAAACAGCCAACTTCATTTCGAGACTTAACATCAAAACGTCCATCAACTGTTCGTTTAGGGAAATCA
ATCTTTACATATCTTTCACTAATTTCCATTATGTCATTAATGAAAGTTGTTTTACCAGCATTATCCGGGC
CATCTACTAAAATAATTTTAGCCATTTTATTCCTCGATTACGACATCTTCATATTTAGGTATATTATACG
GCGAAGAAATTAAAGCGTTAAAGTAGATGAACTCACCAAGACCTGGATGGAATACTTCTTCAGGATTTTC
GAAATATTGAATCTTCGGACGTCCTTTAAGAATTTGATAGTACTCAGTTTTAGTTGGTTTAAAAATTCGA
ATCAGCGCTTCTTCAGGATACTTATTTCTGTCGAAGCTATTATTTGGATCGGTTATATAAAGCGGTTGGC
CTAATTGAATTGCACATTCAACCACTTGTTCAAAACGATAGCACGGGTCACTAATTCGAAATGGATGAAA
AATACCATCTAGATGAATAGGAGCCAAATCACACTACAAGACGCTGCATGATGGAAGGACGTATAACTTT
CTGCGTTACGATAATCTTATTACCATCTGCACCTGCGTTAACCAGCACTTCTTTTTGACGTTCATTCAAC
ACAGTAGTTTGAAGTGAACGATTAACCGACAACATATCGGTTTTTAAGAATTCGTCAATATAAAAACGTG
GTTTATTAGGGTCTGCAGTGATATTGAAAATGAATTCCACATCAAAAGCGCCGTCATATCCAGTGATATC
TGTGATTAGAAAATCACAATCATAATAAGCAATTAATGAATCAACCACAAATTCATTTTCAGACCAGAAA
TATTTACGAGTGTTATACGCGTTATCTTTATACCATAATGGAACAAACTTAAATTCCGGGAAAAGACGTT
CGCATTCTTTAATATCAGATGCATTACGTGGATATGTAATCACATCACCTGGATTAGCACGGTGCAAATG
AAGTTGGAAGTTGCCATCCTTAAGGATAGAATACTGTCCAGTTTCATAAGACCGCATACTCAAGATAGGT
ACGCGGAAAATAGCCATTAGTCAAGGAATCCTTTAACATAATCAAAATCACGTTCAAACACATGGGCACT
TACCATGGTATGAGTATAATCACCAACTTCTACACCACATTCGTTAGCGATATAATGAAGTAATTTTCCT
TGGAGATAAAAATCCAACTGCATAACAACAGCACAGTTCTGGGAACGCATATGGCAGTGGGTATAAAGCT
TACCATCACGAATATAATAAGTCACTGAGTCAGTACATGGATATTCAAGCGTTTCGTCCGAATCAAGCAA
AGCCTGATCAGAACTTTCTAGAATTTGGAACACAACTCTTCGGGAGTTAGGCTTCTCTTTAAGTTCTTTT
AGAAGAGCTGGTAATTGGGCCGCAATGCGAGGACCGTAGAAAGTGTTGAAGTTTGCAGGCAAAGCGTCTG
ATTTAGGTTTAGAAATAAATTTAGCAACGTTAGGATATGCCTTAAACGCTTCTTCTGCATCAGTACCACC
AGAAATCATAAACTTCCAGAAGTCTTCGGCATATTCATAAGAGATGCGGTTAATACGTGGGTCGGTCATT
TTGAATGATGATGGAGTGTCAACAACTACTGTCATAGACCCAATTTCATTACAACGTCCAATACGAGAAT
CAGTTACGAATTCCGGGTTTTCTAAAATTTCACGATTGACTGCTTTAAATGCGGTTTGAAAATCTGCGGC
TTTGATATATTTCATTGTGTTATGTTTTCCCATGTTTACCTCAATACAATTTATTATATACTCAATTCAT
AAAGCTTATTTGAATTTCTTAGCGATGTTGATATAACGTAAAGCTTCAGCATCGATATTTCCAAGAACAC
TATGAAGAAATGCATCAGCGTAGTATTCCAATTGAACAGGTTCTTTAATCACTTTAGCCGCTTTAGTTTC
AAACAGGCCCATCAGGGCCTTTTTAAGAATTTGTTCGTTGCTGTTAATTTTCATAGTCAAAATCTCTTCA
TTAAGTTGGTGGTTAAAAGTTTTTCTAGAAATCATTCTGGGTACCTCAAAGCGTCATCAGAGTTAGTTAC
ATCAATAATAGATATAGAATTTTCTGATAACCCATTTTTAGATAACTGACGTTTATAATATCTTTCACAA
TATGTACACGTCGTCCCGCAGATTTCATTAGCACAATCGAAATCTGGATGTCTGAACCACCTTTTTTCTA
AAAAGCCATCTAACAAAGAGGTTTCAATATTTACTGTATGTGAAAACTCAGTTTCGTTTTCAAGAGTGAA
AATAGTCTCTAAAGGCTTCCACAGTTCTAACAAATTACCTTCAAACTTTTCAGAAGCGTATGCTTCAAGA
ACTTTCAAAATGTAGTCTGTGCTACCTGTACGTCCTGAAACTTTGAATTGAGTGATACCAATATCATTAT
AAAGTTTCAAATCTTGAGGACGAACAAAACGAGTTCTCAACCAGTTAAATGGGTCTGTATCACGAGCTTT
AATACAGTGCTGCATAGGATATCCGTTTAAGGATTTAGCATCATCAGCTGTAACATCAGTACTATGGAAA
ATATAGCAAGAGTCACGATAGCTACAATGTGTTGTATACCCTTTACCAGCATTAGAACAGAACTCATTTA
CAAGAACTTCAAATATTATATTGTTCTTATTGCAAAACTCTGCTGCACGCTTCAGGAAAGAAACTGAACG
GTTTTTATGAATTCCACAGCAGACCTTTTTGATATTATATTGGTCATGCAAGTATTTGATTTGAGTTACA
GCATCGACATGTAGAATTGTTGAAACTTCAATCTCAATGTCTTTATTGACTTCACGAACAATTTCCATAA
CAACAGGGTTAGCGATAGTAATACGCCATACGCCTATTGACCAAAGATACTGAACATAATCCTGAATAGC
TTTCTTCTTCCACTCAACTAGTTCTCTTTTTGAACCAGGATTTATCGTGTTGAGTGTATAGTTAAAGCAA
ATACCTAATTCGTTACAACGTTTAACGTAATCTTCTAACATCTTTTTGTCAACGTCAGGAAGCCTAAAAT
CAGGTCTGGCTGCTACAAAAGCCATTTCTCTTGTAGAGCCGTATACTTCGTTTATCAAGCTATTAGGATA
AGTTTTATTGAGCTCTACGATTTTATCAAGAAGAGCTAAATCAAAATTCGTTCCGATTTTAAAAGTATTC
ATTTTTTGCATCTCGCGTTAATTGATGCGATGGTTTTTGCAGGTCTTACTTAAATTATTATAGATTCGGT
TTATATGATTTAAATGTTTCGAATTCGCCTTTATTCATAAGAGCTTTGAATTCGTCAGGACGCATAGCTT
TGTCGTCGATAATCCAATCATATACTGGTTTATGTGTTAGCAAATTATGGTACTTCAAGCCAATGTTTGC
CAAGTTCTGAATCAGACTTGGGAGAATGTCAATTGCTATACGTCCAGGACCTACTGACTTCATACCGCGA
GCAGTGTAAAGCGTTATGGTATGCCCTGCATCATACAGAGCATTAATGGCAGACACCATTTCGACGTCTG
GTTTGAAGTTCACGTAATCACGATTGTTATTCCACTCTGTTATACAATCATCGACATCAAAACAAAGATT
AAGCATGTTTTCTACATGGTGCATTAGATTCGTTCCCATTGATGAGTGATATCGCCACCGATTGGACGAT
AAGAAACACCAGTTTCTTTATCGGTTAGTACCCATTTACCAGGATTTTTTGTAATCAGAGTAGCCGTTAC
AGGTTCTGCTACGTCATAACTAATAGAGCCGTCTTGAAGTACACGGCCCATGTTACGTAATTGCTTAGTC
AGAAGTTCCATACCTTTATAATACGCGGCTACCGCTTTAAGTGGATTATTCTTGAAATAACCACCTAATG
CAATCCAGATAATTGCTACAGCCAAATGATGATACTCGTTAAACGAACTCATCTTTCCATATTTGTAAAC
TAATGGATTGATGTTAATAGTCACATTACAAGTTGTTTCGTCAATAGTAAACTGTCCCCAGGTCGGATTA
GCGTTGAATTCATCATAACCTGAAACGGCATAAAGCACTTTAGCTTCATCGTACAATTTTGGTCCGTAAA
TCTTGGTTTCGCCAAAATATCCACGAGGGTCGATAAACTTGACTTCGCCGTTATCAGTAATCATAGTATT
ACTGAAGTTCGGGTCACCGTGAATAACAGAGTACTGTCCCTGAGAACGGTTATGATAACGAATAAGGTGT
TCTAAAGCTTGTTTCAGCATTGGCTTCAGACGTCCAATCTTAGTGTAGTTCACATGTGTGATTTTACCAA
ATGAATCAATCAATGGTTGAATGCTTTCACAACGATCAATAACTTTCGTATAGAATTCTTTAGTGAAATC
ACGACGAACAGTTTCAGGACTTACAAAATAAGTGTCTGTGCTGAATTTCAGTGCATCTAAAATTGCATCA
ACAATTTGTGGACGAGCAAGACTTGATTTGGATTTAATATATTCAAATGCCGGCTTACCTTTAATGCGTT
CCATTTCAAAGTTATTTTCATTAACAGAAACTAACTGAGGAACTGAATCTGATTTCACTTTAAGATACCA
TGAAATCTCATCTTTCTGAAGAGCTCGACCATGTTCGGTTAATGCGAATTTAGTTACAGTTTCTTCACCA
ATTTCGAACTGCATTAAAACTACGATTAAGTTCACGAACTTCATGAGCTTTTTCAAGTTTAGGCATATCA
CCTAAATCAATTAGATTCATAAGCTCTGATTTATTGAATGCACTGCCGTAAAGGAATTCTACGAAATCAC
GTCCTTTGCAGTATTCGTGAATTTCCTCATCAGTAGAACCCATGTAGAATTCCCAGTCTTTGAACTGATA
AATTCCTACAACGTTACCGCCTGTTGAACCTACGTTAGTGATATTTTCACCATCGAAATTATATCGACAT
TCATCACCCTTAACATAGATTGCGTTAACATTCCAAGACCATGAACCAAAATCAGGAATAATATCACACC
AGTTAACAATTACGTTATGGCCATCTAAATCTTTGTATAATTTAGCAAGAGCATAAGCAGAACCATACGC
TTCATCAACTGTACGAATAGTCACATTGAACCCTTCTTGCTCACAATAAGCTCGAACAGTTTCAGCAAAT
TTTGAATGAACTACTACAATAATTTCATCTGCGCCAAGGTCAGAATAAATTGTATACAAATTGCTCAGAA
TAGTGTCTTGTTTATAGTTAACAAGCACCTTAGGAATATGATGCGTTATTGGATACAAACGAGTTGCTAA
TCCAGCACCAAGAATAACAGCTTTTTTCATGTTGAAGATCCTCATTGGTAAGTAGGTGTATTGTACACTA
TTCTAGTTAAAGCATTCATACTTTGCTTGTAGTCCAATCATAATCCATCCAATTACAAGTGTTGGAATCA
TTACTGGAGCCGTTAAGCTCCAGTAGATAGTCATGACAAGCATCAATAGTAAAAGTCCTATTGTTATTGC
TTTCATTGTTCGCCTCGTAACATAGCACCTAGTGCACCGCCTGGATGGAACTTAAGGAAGTCATTAGAGG
TAAATCCACGTTCAGACGAAAGGTTGATAGCAAACGTATCGATAAGCGCTAACAACAATGTAGTGGACAT
AGTCGGAGCCAGAGAATTCTCATCAACCTCTACCGCGATGCCTGTACAGAAAGAGTAATCAAAAAGGGCT
TCATTTTCTTGTGGAATGTCTGGGTTACAATGCAACAGAATCTGTTTGACGTTCGGTCGAATCATTTTAA
GATGCTTAGCCACGCCTATCATTTCTTCAGTTTTACCAGAACGACTAATATGAATCAACACGTCATTAGG
CGCAATAAATCCTGCATCACCGTGAGAATAATGCCCAGTGTTCAAGTACATACTCGGGATACCGAGTGAA
GCAAATGTCTCAGAAGCTTTAGTTGCAATATTAGCATTCTTACCAACACCTGTAATAATTACTCGGCTTT
CATAATTACTAAGTCCCGGGCGTCGAAGAGTTTCTAGAATAGCATTATAACGAGCAGGGTTTTGACTAAT
TACTTTGGCCATAGCGGCCAAAGAAGAAGCTTGTTTTATGATTGCGTCAATAGCGATAGTAATAGGAGTA
GTTTTCATATTTCTCTCATTTAATTAGTTTACCGTCCATGACATTATATCAAAAATCGAACATATCGAAC
AGAGATGCTTTCTTCTCGTAATCGAGTTTCGCTGCTGATGTGAATCCTTCAAGTGGTTTAATAAATGTCT
TCTCAAGGAGAACAGTGTAGTCCATCCAATGAAGTACGTCGTCTTTAATTAAATCTGTGATTTCAGTACC
AGAAGGCCATGCGATACATTTATCACCGAATGGGTTTCCTTCACGTAAAGGCAGAACATATACTTTTTCA
CCTTCTACAACTTGTGGTGCATCAATATTACCTTTGATAGCTCGGTTATATGTCAGAATTCCACGAATAT
GGAACGGGCATTTGGGACCAGGGAATCCACCTACGTCATATTTAGCAATGTTATTCGCAGAAGATACCGA
CGCGATGCTAATATAATTCAATTGACGGAATTCTTTTTCAAACTCTTTAAAATATTCTTGTAATGATTCT
TCACCTTCTTGAAGCATACGACGAATACATTCTTTAAGAGCTTTCTGTACTGCTTTAGGAGTCGAAGATT
TCTGAGTCTCTAGACCCATGATTTTGAGTTTAGGCTCAGCGTAACGAGTACCTTCCATATCCCACACGTT
TAATGCATAACGTTTCTTACCAGTCCAAAATCCGCCAATACCTTTAGAACCAAGCGGAGGCCCAGCGATA
GCTTCTCGGTCCATGAACATTAAGTGTTGTTTATTGTTCATGTATTCACACATTTCACGGAAACCTCTAT
CAATAGCTGGTTCCATACGTTCACGTGCAAACTTATCTAAGAAGTCTACCCAATGGTTGGTATCACGGAA
TTTAGATTCACCAACCTTATCGATAATTTTATCAGCAGATACGTAAATAGAGTCTGTATCACCATAAAGA
ACGAAAGCTTCACCTTCTGTACCACAAACTTCATTCAGATATTCATTAACTTTACGTTCAATCCACTGTA
AAGCCATTTGCCCGAATGTTGTGATTGCAGTAGCATTACGCAAATCATAATAACGGAACCAAACGTTGCC
AAGTGCACCATAAAGTGAGTTGATAAGCAATTTACGGTTAATTTGTGCAGTCATACCTGCAACTTCAGTA
CGTTGAGCTCTAAACAACATTTCATTAAGAGATTTAGCAGACAACTTTTTAATCTTTTCTTTAATCTCAT
CGCTGAAGTCGAAACGATAATCAACATCTAATGGTTCGTCAACAGAAAGATTAGGATTATGCAATGCCTC
TTTAATTATTTCACCATTACGTTGAGCTGCAAGCATGTAACCTTTATGTTCTTTACGTTGATTAAAGACC
TTAGTGATTTCAGTTGGAACTACACCATCACGGTCTTTATAATACATCATGCCGTTAGGAGAACAACTGT
ACACATCAGAAGGACGTTCAGCAACAGCGTTAATATAATCATGCAATGGAGCTACTTTAAACGTTCCTGC
TATTGTTTCTGGGCTAATATTCACTTGGCGAATAATACTTGGATATAGAGATGTAAGGTCGAAACTCATT
ACATATTTGTATCGATTTGGAATAGGTTCCTTAACAAAAGCGCCGGGATAAGGTTGAACCGGGTGAGAAC
GACCTTGTGGAATCACCTTGTTCTGCTCTTTAAGGCTATTAAAAATAATAGCATCCCATGTTTTAATTGG
GCTAAACACAGATTGAATCTGTATCTTAGCATAATAACCCATGTCCAAACTCAAGTTGATGAACTGACGC
TTAGCATCAATTTGCAATACACGATACACGTCGATAATGTTATAAGAAATATATCGTTGGTGATTGCTTT
CACGAAGCTTAGAAATAGGGCCGTCATATTTCAGTTTACCAACGTTCAATTCAAATTCTGAAATGTAATC
CAGAGAATACGACGGTTGATTGGTAAAAGAGAATTTTTTGTAAAGGTCAATGTAATCAAGAACAGAGATA
CCGAACAATGTAATGATTTCACGAGAACCATACATGTTTTCGATAACTTTAACACGAGTTTTACGATGTG
GTGATAAACGTTTCGCAGTTGATTCGCCAAAAATATTCTTGATTCGGTTATACACGTACGGAATATCAAA
TGACTCAACGTTCCATCCAGTCAAAATGACAGGAGTTTTCTGTTGCCAGAAGTTGAGATATTCCATCAAC
AATTCTTTTTCGTTATCGAACGGCATATAAATGATTTTATCAATAATTTCAGATGGAACTTCATCACCAC
CTTGTTCTTGAAGCTTAGCAGCGATTTCAATAGACCATTCTTCTACATTACCATATGGAGAATTCAATAG
ATCAAATACGTAGAACCTGTCGTCAATTGAGTCATAATGGGTGATAGCATCAATCGGATGTTTTGCTTGT
GACGGCTCAGGGAACCCATCCGGAGATGTTACTTCGATGTCGAAGTTAGCCACACGAATTTTTGTATGGT
CGTATTTGATTTCATAGTTATAAGTGTCAGACAAATACGCCAATTTGAAATCGTCCATGCCAAGTGCTTC
AAGTCCGATATCTTCCATGCGTTTAATCCATTGGGAGGCATCACGCATATTAGCGAACAACTTACGAGTA
CACGGTTTACCGTAGATATCGAAATATTTCGTAGCCTGACTTTCTGGACAATGAGCAAACAGTGATGGTT
TATATTCTACTTCACGAGTACGTTCACGGCCATTAGAATCGATGTAACGTTCAAAAATTGAATCACCAAT
CTGTTCAACCGTTAAGTAAAATTCTTTCATTTAATTTCCTTTAGACGAGTTATTGTCTTTTGTTTGTTGA
TGAACTTATTATACTCCAAATGGGACCGAAGTCCCATTGCTTTAATTACCAATTGTATATTTTGCTTTCA
AAGTCCAGTCATCTTTCTGTTTAAAAGAGATAACACGGAAGTTATTAGTCAGGCCAAACAGATCTTCACG
AGCAGAGTCTTCAATAACAATCAATCCCCAGTCTTCAAGCAACTGAGCAATCGAATCACGTCGCTGATAG
TCTTCACCATCAATATCAACCTGACGTCCGTCCATACGCAGCATTTCTTTAAAGTGGACGATGTAATATT
TACCTTGCTTTTGGAGGATATGACAGGACTGATAAAGAACTTTATCCTTGTTATTAGCGATGCCCATACG
GGTCAGAGTCTCTTTGACTTTCAGAAAATCTTCAGGGTTCTTCAATTTAATTTCAATCATTTTTACCATT
CCAATGCTAATTTTTTAAATTGTTTTTGTTCTTTCACATTTTTTGTAACTTCTTTGAGAAACTCATCAGT
GACCATGGCCTTCAGTTCTTTAAGGACTATTGGCAACTTGTTATTTTTTTCAAGGAGCCGTTTATACTCG
GTGGCATCATTCATGTTGATTGTGTAATGTTTCATCAACAATTTGATAACTAGTAACTCTGAAGTGTCTT
CGACTAGTTTAGCCCATTTAGAGAATCGACGACCACGCGGAATTGCCGCCATCATATAGTTGAAGTGCGC
TTCATCACTTAATTCAGAACCGACTAAGTTCATCATGTAAACGGCTGGCATACATTCTGGGAACTGGGAT
AATGAGTTCTCAACCATAAATTTTGAGTAGTCGACCTGAGCAATTGACATAGATTTCTTTTCATTAATAG
CATTAATGATTTTAAAGAATTCATTCTCAGGTTTTTCTTTAAACATATCAGCACATTTTTGAATCGCATC
AGCGTCATTAGACTTCCATGCAATTTGATGCTCGTTAAGTTGGACGTCATCATCAAATAAGTTCATATTA
TTTCCAAGTCAGTTCGCAGGTCAGTTGAAGAAGCATATACATAACATGTAATTCAATATTACTTGCTAGT
CCATGAAACTTATTATTTTCGCCTGCAATTTCGTAAAGCGAAATAATACTTTTACCAGGTGCAACTTGGT
CATAACATTCTGAAACTAATTTATCGATGAACCATGAATAATCTGCAGCATATTTTGGAGCTAATGCACG
AAGTTGTTTGATATCTTTGTTCTTCATTGCTTCGATAACATCAGAGACTGTGCCACGGTCATTAGTTACG
ATAGACAGAATACCTGCATCAAGAACACCTTTAGACGAGTACTGGTCTAATTGGCCAATTGTACGACGAA
AGTCCGGGAAGTTCTTTTTAACCAGAGCTGCAACAACTTTCATATCAGCGATTTCGATATTTTCATTCTT
ACAGATTTCAACCATACGATGAATCATTTTCTTCATCATCGAGATTTTATCTTCTTCGGTTGGACGTCCG
AATTCGATAACTCGACAACGACTACGTAACGGTTCAATAATTCCATCGATGTTGTTAGCAGTAATAATAA
TAGAACAGTTACTAGAGAATTCTTCCATAAACGTACGAAGGTGACGTTGTGATTCGGCGAGGCCACTACG
GTCAAATTCATCAATAACAATAACTTTCGGCTTGCCTTCCATTGAGACTGAACGAGCAAATGCAGTTAAC
GGACCGCGTACAAAATCAATTTTACAATCAGAACCGTTGACGAACATCATTTCAGCGTTGATATCGTTAC
ATAATGCTTTTGCCACGGTTGTTTTACCGGTACCAGGAGATGGAGAGTGTAAAATAATATGAGGAAGTTT
TCCTTTAGATACTAAAGACTTGAATGTTTCATGGTCATACGCAGGCAGAATACATTCGTCAATGGAAGAA
GGACGATATTTCTGTTCTAGAATGTGTTCTTTGGAATTGATAGTAATCATGTAATTTTCCTCATTATCAT
TAAACTGGAGGATTTCTCCTCCATAATCGTACTACATTAAACGTAAAGCTTTGACTTAGAAGTCGTGGGT
AGAATCGGCTTCCATCGCAATAACATAACTTACTTGAGAGCTTTCAAACTTAGCTGCAACTTTATCACCA
GCTCCCCACAACATTACTTTATAGTTACCTGGCTGAATTTTCATATTAGCCATATTGATTACGAAGTTAA
AGTTGTTAGAACCATCATAATCGGTAAGAGTCAAAGAATACTTAGGACGAGTTAGTCCGGAATCTTCAAC
TTTATTATAGCCATTGATAACAATTTTACCATCTTTATTTGTAATAGCAATTGTATCAATCTGAAGACCA
CGTGAAACTCGAAGCAATTGTTGAAGGTCTTCGGCTTTAATTTCAGTAATCACAGAAGCCACTGGGAATT
GAATTGGCTTATTAGGAAAAACAATGGTGCTCTTGTCAGCGGCAGGCCAATAAACTGTGGAACGTGTATC
TGCAATTTTAATATTACCATCAGTGTGCATTGAAATTTCAGCATCGTCAGACACTAGACTCAAAATGCTT
AAGAAGCTATTCAAATCATAAAGTGCTACGTCAAAATCAATTTCATCAGAGATATTTGCTTCCGCATAAG
TGGTGCCATTAACTGCACGAGTCATAATAAATTTACCTTGACTCAGCAGAATGCCTGAGTTAATAGAGGC
AAAGTTTTTCAGAATAGCGATAGTATCTTTAGACAGTTTCATTTTATTTCCTTTCAAGACAATTCAAAGT
TTATAACAAATTTATTATGCAGCAACCATCTGCTTTTTAATAGCTTCAGGCAGTGATTCAATATATTCTG
GAATTTTAGAAGCAACAATTTCGCCAGCTGCAATTAGTTGTTCGTCGGCATCAACACAATAGAAATCTTC
TAGACGCTCAGAACCGTCTTTATCAAGAACGATTTTTCCGCCAGCTTCAATAGAATCTTTATAGTGCTTA
CGCATCAGATGAATCCACATATCAGATACATCGTTATCAATAAAACCATAAATCATAAAACGAGTTTCTT
GTGGCAAAGATTGAAGTTTTTTAGCACTTGCGTCATCACAATGCAGGACCCATGCTTTACGAACACGATT
ATGGTTATGTGGGTTAGCGTCAGTACGGATAGAAGTAACTTTCAGATCAGCAGCAGTGAAACCTTTAGCA
GTAGTAAACATATTATTTCTCTCTTATTCGTAGAAGTCGGTAACTGTCCATGCGGAATTGCGATTAGACA
TTATTTTATTATACTCATCTTTAAAAGCAGATTTGAGCATTTGTTCAGTAACAATATGTTCTTCACCTGA
AAACGTATTGGTCAGAACATATTTTTTAATTTCAGGGACAACAAGAAGATGTTGACCGGTTGAATACTCC
ATGTTGTTCTCCATTTAATTTGATGTGGTCATTATAACCACATCGTGTTAAAGCGTTTATGAAACAGTCA
TTACAGTAAATCGTCCAACTTTGCTCATTTGAAGATGTTGTCCATAAGCTTGTGGGTCATGGTCTCTGTG
ACTAATTATAAACACGTTTGCATCGGTTAGAGAGTTAAGAATTGTTGAAATAGCTTTAATACCTTCAGAA
TCAGTCGCTGAATCCATGACTTCGTCCATAATTAATGTATTGATTCTAACACCAGAGACCTTTTCGGCAA
TATCTCGCCATGTAAACAACAATGCGATATCGATACGTGCCTTTTCACCTTGACTAAATGAAGCATAACT
AAACTCTTCACGGCCACGTGATTTTATAGATTCATTGAATTCTTCATCAATAGAAAACACGTAATCAGCT
TCCATGATTTTAAGGTAATGGTTAATCTGCTTGTTGAACAGAGGCACATATTTTTTAATGATAGCACCTT
TAATACCAGAATCTTTTAACATATCTGTGATAATACCACGATGGTATTTTTCAAGAACGATATCCGATTT
TGTTTTAATGATTTTATCAAGTTCTTTTTGAAGCAAAGCTATCTCATCGGCATGGTCGATAAATTCCGCC
GAGGCTTGTTCTATTGCAGCTTTAACTTTCTTAGCTTTATCAATAGTGGCAATCATTGCTTGTTTCTTGG
TACGAATATCAGATGCAAGGTCCTGTTTAGTCTTAACATTAGCTCTATATTCGTCCACTAGGACACTCAG
ATTATCTCTGTGACAGGTAAGTTGCTCGAATGAGTGATTACATTCATGAAGCTTATCGGTAATCTTAGAG
ACAATAGGATCACCCTGGTGCAACTGTGATGCACAAGTAGGACATGTACCACCATCATGATACATCTTAA
TAACTTTGTTATATGAGTCAATTTTAGATTTAATCAAGAATGCTTCTTGTCCGATCTTGTTGAATGCCTC
AGTAGGGTCTTCATCAAGAACGATATTAAGTAGTCGCTCATTAGCTTCTTCGATTTCTGCTTTTAATGAA
CGAGCTTCTTTGGCTAGGTCGTCATACATATTCTGTAGACGCGCTACATTATCACCAGATAATTTCTTTT
GACGTTCGATATTCTCATTATAAATCTTAATTTGTTGGATAACACCATCTTTCTTGGCATCGAGAACTTG
TCCCTGGGAATTAAGTTCTCGAACTTGAGACTTATTGATTTTATCCATTTCAGCGAGTGTGCCAACTTCT
AAAAGGTCTTCGACAAGTTTTCTACGAGCAGGGGTGCTAAGAGCCATGAAAGGGGTATACCCTGCCGTCC
CAAGCACAACGATTTGTTTAAAAGACGCGTATGACATTCCGATGCTACGTTCAAATTCTTCTTGGAAGTC
ACGACTGCTGGCAGATTCATCAAGACGAACACCGTCAACGGAGATTTCGAAAATATTGGGCTTTTGGCCA
CGTTTAATGAAGTATTTTTTATCATCGAATTCCATCCAAAGCTCAACTAAGAGCTCTTTCTTGTTCGTGC
TATTAATGATTTGTCCTTTCTTAACATCACGAAATGGTTTACCGAAAAGTCCGAAAGTAATGGCTTCTAA
CATCGTAGATTTACCACCGCCATTTTTACCAGTGATTAATGTCTTTTGGACTTTATCTAATTGGATATCA
ATAGGATTCCCACCTACCGACATGATGTTTTGATAACGAACACGATTTAATTTAAATGATTTCATATGTA
TTCTCTTCGAATGAAGTCCTCTACATATTTTAACATGTCATCTCTATCAGCAAAATACTCGTCTAGTTCT
GCATACATAACAACACCCGGTGCGTACTCACAGGTAACATACATTGTTCCAAAGAAACGAGGAGTTGTCT
CCTCGTAATTCTCAGTCCATTCAACGATACCAATATAACCGTCACCAATACTAAATTCATGACGATGGAT
TTCATAATCAGTCTTCGTCATTATACGCATCCTTGATACATGCTTCAGCCATTTTAAGAATAGAGCCAGG
AGTATCGTTGTCCATTATATTAAAGCTAAATTCAATAGCCCAGTCGGTGCAGACATGAACTGCTTTAACT
TCATCGCCTTCAACGCGTAATGGCTCAATCCAATACTTGATAGTGTTCTCGAATCCATCATCATCTTTAA
CGTCCATTTCAACTTCAAGCCTGAGTCCAGCATTGTTAAATTCATCTAAAGTCATTGTGTTGCCTCAATA
TAAAGTTCGTTGGAATATTTGACCAGCGCTTCTCTGTCTTCGTCTGAGATATCTGGAATCGCGTCAATAT
ATTCTTTAATGATATCTTGAAGTGATTTAATCTCGATTTCCTGGTCGTCATCAGATTCAACACTGTTATC
AACTTTAGAAACCATACGAAGAGAGTGAACTACTTTTTCAAGTTCAGATTCAAACTTAGTCAACTCTGAA
TCAATTTCTGATACTATAACACGTACGGCTAGATTGGTATAATCAGAATAATTGATTTTGCCTTTAAACG
GATAAGTGATTCGTCGATGCCATGTTGTTTCATTAGGAATAAATTCCATACGTTCAACATCAGTGTCAAA
TACCCAGAATCCGCGCGGGTCGTTCTCATCACCTGCAGTAAGAGTCCATGGTGTCCCAATATATTTGACG
TTAGCAGCTTCAGAGATTGTGTGGAAGTGGCCGGACCAGACTTGTTTATAAGTCTTTAAGAAATCAGGTT
CAAGCCCATGAGACTTCATCCCTTTATAGAAATAAAAGCCATTCAGTTCCCAATGACCAACACAATACGC
GGCAGAAGAAGTCTTGATGTGCTCTAAGATTTCACCTGTATTTTCTTCACACATCCATGGAACGATATCA
ATCAGACATCCGTCAAAATCTACAGTAGTTGGATGCTCGTAAATAGTAAAGTTTTCAAATTGAGTTAACA
ATTCAGAAACAGTGTTAGGTGTTATTGTATTCTTAAACGCCATGTCATGGTTTCCTATCGTGACATGAAC
GTGAATACCTGCTTTAGAAATCATATCAACGATTTCACGATTGAATTCCATTGTACGATGTGTTATTGCT
TTACGGACATCAAACCAATCGCCGTACTGAATCCAAGTTTTAATCCCGTGTTTCTTAGAGTATTCAATTG
CTTGACGAATACCATCACGTTGAATATCTTGAACCCATGGGTCGTCTTGTTTGACTCCGATATGGAAGTC
GCCTAAGTGCAAAATTTTCATATTATTTCCTCATTAGTTAATTCATTTTATCATCCGTTTATAAAGCAAA
AAAGGAACTCCGAAGAGTTCCTATCCACATAGTACACCGTACAGAGGCTCATTTGAACTTTTAAATCGAA
TGGGCTTGTATGTAATAGTTCCTTCGGCTTTAGCTTTATCATAAGACTCTTTAAAACGTCTCGTTCTTTC
TGCTTTGCCTTTACGGATTTTATCGAAATTTTCAGAGGTCAGGTCGTTCGTCATGCATAATTATCTCTCA
GAAAATACCTAAACCGATTTCTCTCATCGTTTCCACCATTTCTTAACTTGAAATGAATCAACCCACACGA
GTTGTTTTGGGTCTGCCTTTACAATAGGCGGACAAATTTCTGTAATAGAACCGTCGTGATATTCCTTTTC
AGAAATTTTAACACAAAGAGGACCTCCCAATTTAAGGGTGAACCCTGCGTTCAGCTTCAGACGTTTAAAC
TTTGTTTGAACTAGCGCCATTAATGATGTCCTCAATAGCTTGACGAGTAGTAACCCACTGGATTTTAATT
AACTTGTCATTGTATGGTTGTCGTAGAATATCCCGAGATTTCTTAATAGCATATTCGTAAGCTTCGAAGT
TGTTTTGAATTGCTGCTTCTTGAGCATGAGCATAAAGACGGTTTAGTTCAAAACGATTCTTTTTAAGAAT
CTTTTCGGATTTTTTACGTGCTTCAGCTTCATTTTTCTTTTGGATTTCTTGTAGCATTTTAGCTACTGCA
TCTTCTGCTTCTTTATTTTCAATAATCTCGGTAGTCATATTATCTCATTAAATTAAAATAAAAACGTCCA
TCCTCTTCAATACAGAACTCGTACTCAACTGGAGTCCCATTTATTGAAAATGACACGTCATGCGGGTTCA
AAGGGTCGATGTCAAAATTAATTTTAAATTCACGACCCAACAGTTTTACCAAATAAGGGATTGCTTCGTC
AAAAGGTTCTTCTAAGTAGTTAGAGATGTCAATTGTCATCCTCATATAAAAAATCCAAACTAGGCGAATC
GCTAACAACTTCCTTCTTTTCAGCCCCAGGAGCTTTATAAGCGGATTCTTCATAATGCGTCATTTTATCG
TAGATGTCTTGAATAAACGTTTCATCTACCAACGCTACCATATCATCGTCATGACTGTCGTAGACATTAT
GAACGAAGTAACTATATTTCTTTGCAACTTCCTTACGTTCTTTTTTGATACGTTGGACAAAAGCATTAAA
ACAAGCTCGAGTTATGTATGCATGTGGGTTATTGTACTTAGTTTCGTCGAAATTATGAAGTCCCTTAATA
GAGGCTTCAATCCCATCTGCAATCATCTCCTGCTTCCAAGACTGGGTATATCCTGAAAAGTTGAAACGTT
TGGACAGGCCTTCGGCGATAAGCATAATTGCTAAACCGATGGTATCATTCTGACGAATAATTTTGTTTGG
GTCTTTATTATTTAAGAGCTCCTTTTTCCACTCGATTATCCCGGCGAGAAGCTCTTTATTATTCACATAG
TTATTTTTAGGTTTTTGTTCAGTCATAAGTACCTCTTGGCTCAATTCATAGGTCTATTATATCATAATAT
TTAGAGACCTATCTTAAAGCACGAGATACTATCGGAGCAAACAATAAGCCCGAAACACTTTTTCCATTGA
ACGTTTGAACTCATTGATATCGATATAAAGCTCAGTAAGACCGGCATTATAAAGAAAATCTAAAAAGTTC
TCATGTGTTTCGTTATAGTCGCCTTCGTTTAATTGAGATACATGAGTTTCCCAAAAACCAACACCTTTAA
CGAATGGAAAATACGTGACTTTCATGTATTCGTCAACATAAAATTCGCCCAGCTTTTCTTCAGTTATACT
GATTCGAGTTAATTTCATTCTATTTCCTTTGCTGCTTCAAGAGCAGCATCCAGCGAATCAAATTGGTCGA
CGAAATCAATATTCAACGCATCGTCAACCGTAGCATATAACCACCATTGTTTGAATTCATATTCTAGGAT
AAATCCAGGCCCTTCAATCTGAGGAAGACCTAGGCTATTTGTACCAACTTCGTAACCAGCTAGACGCAGG
TCATTAATCAAAGTTTCTGTTAATACGCTCATTTTACCGCCTTAACAATTTTCAAGTCAGCGAATTTTTT
CTTACGTTGATTTTTCATACTACGGATAGTCTTTTCAGAGATTTCATGTTTCTGATAAGCTTTAGATTCA
ACACCAAATGCAGCACCGTCAAATTCAGAAAGAATATATTGTACTCGAATTTCACGAATAGAATTACGTC
CAATTTTCTGGTCCGTGTTTTTGCATGATTTCCATAAAGACGGAAATTCCCACGCGTCAAGAACTTGAGG
AGTAACAATATTGCCAGATTCCAGAAGAGCAACAACTTTATCGAAAGCGAAAGAATTAACTACGCTTTTG
ATTTTAGTAGACATATTATTTTCCTCGGTTATTTTATTATCCAACGAGAGAATTATACTCATCTCTCGAG
AGTTTGTATACTATTTTTGAAGCATGGAAAGTAAGTAATTTGTATCACGTGGAGTAATATCAACACCCAT
ATCAAAGATGCCTTTATAGATTGGGTATTTGTTTTCGGTTGTATGGAAGCTGAAACTATTTCCATCACAA
CTAACAGTAATAGCATCTGTTAAAATGTCATACTCAATCCTAACAATTGAATCCCCAATTTTAACGTCGA
GGTGTTTTTTGAATTTGATAAAATCTAATTCTTGGGCCATGATATTTTCCTCATTTTAAGACGATAGGAA
GATAATAACATGTCTTCCCTATCGTTGTACATTATTAACCGAACTTTTTTGGCGCCTTTCCAGCCTTCGT
ACATAACTGCACAAGTCAGTAGTACAGCGTGCTGGCATTCTTTGTATTTGTAAATCCAGAACCAGCGTAA
GAAGTCTTCATCCTCAACGCCGGTGGATTTCATATTGGCAAAGAATTCGGCACGTTCTTCACGAAGCTTT
TGCGATAACATAGATTCAGGATTCATTTTGTGTTCCACACCCCATTTTCATCGATGAACTTAATCCAGTC
ATTTACAGACCATTTAGTTGTATCACCCTTTGGATTAACATTTAAAGTATATAATCCCTGCTTAAAAAGC
ATTCGTTTGATATTCATAATTTCCTCAACTGTAACGATAACATTCGTTAGCTTTACGTTTGGCTTCAGTA
TGAGAAGTATTATAATCATAATCTTCTTTACTGTAAACATCTTTTTTCAACTTACGAACTTCTTTGCGGA
GTTGTCGATTCATTTCATTCTTGACTTCAGAATCAACGCCTTTCATACGTTTCCATTTATCTGAGCGGAA
AATGTTTTCAACCATGTCTTTGTGGCTAACACCGTCAGGAGCTTTACGTTTACCAATGTAATAAAAATCT
TTAGAAGACAAATCTTTACGACGATACGTTTTACCCATAAGTACCTCAGAGATTGATTTCAATGATACGT
TTGATATACTGCACATCACTTACTGAAAGGTCTTTAAGACCAATTGATTCTAAACGTTGTGCAAATGTTA
ACATATGGGTGAAGTCCAATTGCGTTTTAGTCATTTGATAAGTGTGAATGCCATTAGCAAATTCAACCTT
CAAATCGTTAATGGTGACGAAAATCATTCGTTCATCATTCATGTTAAGAACTAGAACAACTTTCTTTGAG
TCTAAACTAATCATAGTTTAATTTCCTTCGCAATTGAACAGAAGATGCCACGGTCACAAATCATTTCACC
GATTCCAGGATACTTGATTGAGCGATACCAAACATCTAGAGTTGAAACTTTGGTTATTATAATAACATTG
CCGTTAACGGAATAATACTGATCAACCTTAATTTCTTTATCTTCAATTGTCATTTTGTTTTCCTCTGTGG
TAGATGATGCTAATCTTAACATATCTATCGAGGATGTAAACTGTTTTATGAAAATATTTTTGATTTGAGA
GGGGCACAAGGAGATAGTGAAGTGAAGATTCCAATGGATTATATTAGAAATGAGATAAAGAAGACCAGGC
GGCACCTGGTCAATCTTCTATGATATCAGAGTCGTATCCTAATGAAATCAAGGACTTTTTAAACTCTGCA
ATATCTTTGTTTCTTATCATTTAAAAATATGACAGGATAACGAATATTAAGTGAAGTGAATCCTGCACGT
TTAGCAAGAGATACGATTAAAGGACGGTCATATTCAATCTTACCATTATTAGTGAGGACTTTATAAAATG
TATAAGGAGCATTGAGCTCCTTTAAAAGTTTTGTAACAGTATAACATCCTGGACAACGTCCAACTTCTTC
AGGGATGCCATATATTTCAATCTTGTTCTTTAAGTTCGAGTTTTGTTCCACGAGAAATAATTCCTTGGTA
AGCCCAATAAGGAGGATTAACAGAATCCTCACCAGAGTTTTCTTCAGGAAAATAAACCTGGATAACAAAT
CCAGATGCATCAAAGGTAAAATAAACCGTAGGCAGTTCACCTAACAATTCGGCACGAGCATTAATTTCTT
CGAGATCCCGTTCACGTCCAGCCCAAAAACTAGGATTTAGATTACATTCGTAAAAATAATAGTCATTACC
GAACATATCAAACCCCTTCCAACTCTCTACCACATACCGCTCAAAACTAATCATAATTAAGCCTTTTTAT
CAAGAACAGAATTCAGTTTATTAGTAATTTTGTCCAAACGTTCATTGAATTCGCTGGAGGATAAACCCTT
TTCCGGAGAAATTAAACTAATCACGAAAAATACACCAGTAAAAGGAATAAGAAAAATAGCTCCAACTGCC
ATAAACAGAAAGAATGTTACAGTTGTAAGAAAATCAGCTAAACCTTTACGAAATTTATACATATTTACCC
TTAATTAATTAACCAAACATTGATAAGCACTAAACTATATTGCGAATAAAATTCTGGGCCAAAATGAAAA
ATCATATCATTTATAGTGTCCATAATGTAATTCAATTTAATCATGTTTCCACACCCCATCGGTATTTGAC
CAAAGTCGCTGATTATCTGATCCTCGCCATAGCTTTTTGGTCGGAAGATTTTTCTCATACTTCCCATCAA
TAATAACATCAACATATTTAAGCATTTCTAGTTGTTTAATATCTTCAAACTTGTATCCTGTCCACAACCA
AATGCTTTTATTGGGATAAAGATTTTTTACTGTTTGAGCAATGCAATGAATAACATCTCGATTGTCAGGA
TAGAGAGGGTCACCTCCGGTTATAGTCAATCCTTCTATATAATCGTTATTCAAACATTCAATTAATTGTT
CTAGTGTTTCACCAGTGAATGGAACACCATTTCTAGCATTCCATGTTGATTTATTATAACACCCTTCACA
TTTATGCAAACAACCTGTAACGAAAAGAACGACCCTACAACCAGGGCCATTCACAAAATCGCAAGGATAA
AATCTATCATAATTCATTGGTGTTTAACCCTATGCATGATTTCTTTATTTTTACCGAGATTAAATCCGCG
TTCGTTCGGATTTCCCAAATAACCGCATGTTCTTCTTATGGTGTTCATCTTTTTAGGATCAGTTTCTCCA
CAAATAGAACAAACAAATCCGGTTTCAGTAGGAGTCATTTCATGGGTACTTCCGCATGTAAAACATTTAT
CTACTGGCATATTAACACCAAAATAATCTAAATGTTGTGCAGCATAATCCCACACGGCCTCAAGACCTTT
TAAGTTATTTTTCATATCAGGAAGTTCAACATAAGAAATGTGACCACCTGTCGCAATGAAATGATATGGC
GCTTCACGAGAAATCTTTTCAAACGGAGTAATATTTTCTTCTACTGAAACATGGAAACTATTAGTGTACC
AGCCTTTATCAGTAACATCCTTTACACTTCCATATTTTTCTGTATCAAGTTTACAGAAGCGATAACAAAG
GTTTTCAGCAGGTGTAGAATACAAGCTAAAAGCAAACCCAGTTCTTTCAGTCCATTGTTTAAGAAGAGCA
TTCATTTTAGTTAAAATTTCTTGTCCAATATCACGACCGACAAGAATATTCAATTCGTGAATACCAATGT
ATCCTAGGGACACTGAACTTCTACCATTTTTAAATAACTCAATTATGTCATCATCAGGTTTAAGACGAAC
CCCGAATGCACCTTCTTGGTAAAGAATAGGAGCAACAGTAGCTTTAACTCCTTTTAAGGAACTAATTCTA
CACATCAAAGCTTCAAAACACAGGTCCATTCGCTCATCGAACAATTCAGTAAATTTCTGTTCATTGAACT
GTGTTCCAATATAAGAATCTAACGCAATACGAGGAAGATTCAGTGTTACAACGCCAAGATTATTGCGTCC
ATCAAGAATTTCATTGCCAGTTGAATCTTTCCATATGCTCAAGAAACTACGGCAACCCATTGGAGAAACA
GGAACTGAAGAACCGGTAATAGCTTTATTATTCTTAACCGAAATAATGTCAGGATACATTCTTTTGCTTG
CGCACTCTAACGCAAGTTGTTTAATATCATAGTTCGGATCATCTTTATAAAGATTAACACCTTCTTCAAC
AAACATAACAAGTTTAGGAAAAATAGGAGTTATTCCATCACGACCAAGACCTTTAATGCGGTTTTTAAGA
ATTGCTTTCTGAATCATTCGTTCAGTCCAGTCAGTTCCCGTACCAAATGTAATTGTTACAAAAGGCGTTT
GTCCGTTTGAACTAAAGAGAGTATTTACTTCATATTCATAAGCTTGGAATGCATCGTATACGTCTTTTTC
TGTTTTAGACTGGGCATAATTCAACGCATCAGCGATTTGCCATTTTTCTGCATCCTCAATATGTTTTGCA
TAGGTGCGTTTAACATAAGGAGAAAGTACTTTATCTACATTAGCAAAAGTCGTTCCGCCGTATTGATGGG
AAGCAACCTGTGCAGTAATTTGTGCCATAATTGCAGTAGCAACGCCAATAGATTTAGGCGTTTCAATTTG
AGCATTGCCTAATTTAAATCCATTCTCAAGCATCCCCTTTAAATCGACTAAACAGCAATTGGTAAACGGA
AGAGCAGGAGAATAATCAATATCATGCATGTGAATGATTCCGCTTTCATGCGCATGCATAATAAAAGACG
GGACCATATTTTTGGCAATGTGCTTAGACACAATACCAGCCATAAGGTCCCGTTGAGTTGGAAAAACACG
AGAATCTTTATTAGCATTCTCGTTCAAAAGATCTTTATTAGTTTTATAAATTAATCCTTCAATTTCTTTT
TCAATTTTCATTTTAAACTCTTTCTAAGCTGCTTTTTGAATGAAGCTATTAATTGTGTTTTAGTATCAGA
TTCATTATATTCAAATCCTCTTTGAAGCATCTCAGCCATCATTTCCTCTTTACCTAGTCTTGAGAACTCT
TTAGTTTTGTCTGGAACAAAATTAGGATGGATATTATTATCAGAATAATCTTGTTTCAAATAAGCAAGAA
GAGCTTCAAGCCATTCTAAGTAGTCAACGTTTTGTCCTTTCAAACCGGAACGGTTGAACTTATGCTTCAT
TTGACCTTCTGCTGCGTTGCACAGATTACAGAGTAATCCACGAACTCTACCGGCTTTTGGCCCGTTTAAT
TCATGGTCGTGGTCAAGATGGTTACCTTGAACATCAGGGTCTAATTCACGGTGGCAAATAGGACACTTAC
CGTTCTGTGCATCATAAAATTTTTGTTTTTCTTCTTTATATTTTGCGCCTGATAATAACATGATAAACCC
TTACCTTAAATAGATAAGGGTATTTATAATTTAGTAAACGTTATAAAAGTCTCGATGAAAACGTTTATAT
TGACGAATCATTTTCTTAGTAGGACGTGTTACTGAAATAATTGAAGTAGTCATAGTCGGATTGTTTGGAG
CGCCAGTCATAACAAATTTCCAGGATTTTTGGCCATTTTTTCTTTCACCATAAAATAATTCAGTTTTCAT
AATAAACCTTTAACTTAAACGTCTTTCTAAATATTCAATGTATTCCGCTGCGGCTTGCATCAGATTACCT
TCATAACCGTCATTATTTTCTTGGGCGGCTAATTTAGCTAAAGCATAAGAAATACGTTCACCTTCGAATT
CGCCAAGTCCACCATCACAAACTACTTGGTCAATTTCTTCGAGTTCATCTATTGAATGGGATTCCCAGAA
GCACCAAAGAGAAGTATCACGGTCATAGATGCAAAGTTTCTCACCTGTGTTCAACATCACTTCGATAATG
CCATGGTCGCCATAACCATCTTCGGTAGTAGTACCAATTACCTTGATGATTGTTCCTTTCTTTAATTCAG
GAAACTTGACTTGTAGTTCTTCATCTTCTTTAACAATCTTGAACCATTTACCGCGAGTTTCAGAAATATT
CATATCAATATTCTCTATAAAAGTTACGATGAGAACGTTTAGCTTTGCGAAGCTGACGTTTAGTAGGACG
AACTGTAAATGGTTGTCCAGAGAAAAAATTCGGATCGGTTTTAATAAGCAAATACCAATCATGTTTGCCA
TTTTTTTAATAAACGGTACAATAATTTAACTTGCATAATAATCTCTTCCCATTTCCATATCAATTAATTC
ATTTATTGAAGGTTCATCATAACATGGTTCTTCGTCGTTGTAAACCGTTTCGACGTCTGGCTCGACAGTC
TCCCATCGAGCAGAATACCACGGTTTAACCCCGGAGTTTATTGAGCTCTTCATAATCAATCCAGGATTCT
AGCCCTGACGGCAGGTCACATTCAATGTTCCACAGAAGCTCTTCAATGGCTTGCAGGCGATTATATTCTT
CAACGGTAATGGTAACCATTGGTGCAACCGGTTCTGCCTTTTTAACCATCATATCGTTCATCAGGACGTA
AAGGTCATCACGAACGACAGTGTCCGTTCCAACCCCATGATTTGGCTTCGTAAGCTAATGATGAAGGGAG
CACATTTAAAACTTCAAAAATAGTTGGAGCATCAGGACCAAGTTCATTGGCACAAACTTCGTATACATCT
TGGAAATCTTTAAGATTTAATGAATATGTCATTTAAAATATTCTCGCAGTTGGTCAAATCCACCAATGTG
ACTTCCGTCAGGAGCAAACACTTGAGGCATAGTCAATCCGACTTGTGATTCACGTCCAAGCTTAACCAGA
AGCTCAGCAATTTTCTCATCATCAAAAACACCTTTTTCTGGCATAACATTAATGAATTCGAACGGCTGTT
TCTTAACAGTCAGCAATCGTTTCGCATTATCACAATAAATGCATTTATGAATAGTAGAGTCATACCCGTA
CACTTTAAACATTATTTTTCCTTTCATCGATTAAATATGCAATGCCAAATACAATACATGTAATAAAACC
TGTGATACAGATAGAAACCAACAACACTGTACCAAAGAACCAAATCAAGTTATCTTTAGTAGTTTGTTTG
ATATCCATCTCACGAATTTCTATAGCTATCGTATCACCTTTATTCAGAAGCGTATAAAACGATGGTGATA
CACGCCTGTCAAAAACTCGTCCTTGCTCATCTTTATAGACTGCAATAAATTCTAATTTAGAATATTTTCC
TGTAGATTGGCCTGAGATTAATTCCACTACCTCCACAGGAATTACTTTAGTTTCCATGTAAGTATTCTGG
CTGTTCCAAATGAATGGAATAATAGCAAAAACTAAAGCTGCGATAAAACAACGAAGGCTATATCTCATTA
TAATGTTCTCTCAAATTTGTGGAAGCATTTACGGCATTTCAATTTCAAGTTATCAGTGGTCCAGTTAACC
AGTTGGACTTGGATAGTTCCACATTCCGGATATGGATGGTTTGATGCCGATTTGGCAGCATTTTCACGTC
GTTCAACCATTTTCATTATTTCGTTCCATGCTGGAGGAACGAACTCTTCTTCACCATGAATTTTATCTCG
CTGAACAAATTCAATCTTTGAACTATCGTCAATAAACTTAACCAAGCCATGATTAGTGCTCATATCAATA
TCCTCTAAAAGACGTAGTTTCATTATAACACCTCAATGGCATTTCGTAAACCATCCGCTTTCGCATTCAG
AGCTTTTAACGATTTAGTTTGTTCTGCAATCTGGGCTTCGACTTCTTTCAGACGAGATTTGAGATATTCG
CGTTCTTCTCTTAAGTTATCAACCTTTTCTGCTTTAGGTTCTTTAATAGGCTTAAACACATTAGGGTTCT
TCAGTTTAATTTTAATTCGAGAACTGAATAACATTGAACCGTTATCTTCGGTTTCACTGTGCATTTCTAC
CACGTCCATGATTCTTAACATCATGCGAAGTTTATAAGACAGCGAACGAACGGTTTTATTGTGCTTCTTA
ATTTCTTCAGCTTTCATGGTGCCGAGATTACGTGAGTAATAATAAGGAACCTGAATATCAATTGATAATG
ATGCGGTACCATTACCGGTTGGTTTGAACACTGCAGTAACCCAATCTTTAACATGAACTTTATTTGTACG
ATCATCGCCGCCAGTGAATAATTTACAAGAATGTTTAAAAAGCATATTCACTTGGTTATTGAATTCACAA
GCAAATTTATCAGCAAATTTAGTTTCAGGAATGGTAGAGAACCAATCAGCTAAATGAGTCTTTTTAACAT
CATTAACAATAGTGAATTCAACCAAATCGGTTTTAGATGTCACAGATTTAATAAAGCTCGGCTTCATAAA
GTTTTTGATGTTATCACGAGCTACAGTAGAAGATAATAAACGAGAACGTTTGAACCATTGAAGCAGTGTC
CCTAATGAATGAGAATACGCATTCTGAGTATCTTTACAGATATGATTTTCTTGGCCCGTGTATGTACCAA
AATCGCGAAGAATACCACTTACTACATCTCGGTGTGGAACATCAAATCCTAGTGCACCAACAGCGCGCTG
GGCATGAACGTTAGCGATAAGACCGGCAAAGTATTCAATGTAATGTGAACGTGTCATAATGTTTTCCTCT
CGTTAAGATAGAAAGATTATACTCCAACCATCCTTGGTTGTAAACTGTTTTTATGATTTTAATGCATTCA
TTGCGTTAAAAAGTTTAGAATACTGCAACTGGAGATTCGTTACAACACTTTGAGCATCACGGAGCTTAGC
TTGTGCCTTGTCCAGTTCAACAGACAGTTGGTCCACGGGGGCTTTGATTTGGTTGTAATGGTAATCTTCG
GCCGGAAGAAGGCATTAGAACATTTAGTTTTACTGCCGACAGTTTGCACACATTTGGCAACCTTTAACAT
ACCAGGTTGTGCCGGAGCTGGAGAATATGCACCTAAGACTTCGGCATTACCAACTGGTGTTGCAGTAATT
GACGCTTCGAACGTTGCATTTTCCTTTTTAAGATTTTGATAGTATTCAGAGTCTTTGTGCCACCATGGCG
CAGGAACCTTTTTACCAATAGATACACGAGCCTGGATAGCAATATGACCCTTATTCTTGATGGGGTCGAT
AATATTAAGCTCACGAGAATAAATTGCTTTAATCTGGTGGATATTATCACCTAACACTTCCAACGCTTGG
TGGAATACACGAGCAACGTTATCATTCTTAGGTTTATACGTAAGAGTGAACTCATTCTCACTGATAACCA
TGATTTCCAACTTATCGTAAGTATATTTCAAATGTTTCATGTTAATTGCTTGAGGACGAATACGAGAAGC
AATGGCCAACAGATTGTTAAGGTTATTTCTGAACTGTTTAGCAAAATATTGTCCGTAGCCGCCGATACAA
AAATTACGAAGTTTCTGTTTGGCTAATAAACGGCTGAACTCACCATTTTTAATGAACTCTTTAACGGGTG
TGTTAGTAACGCATTCAAATTGAGTAAACTTACGAGAATTAATCCCATAATATGAACAGATTTCCTCAAT
CTCTTCAGGAGTCTTTACAGGCATACGGATAGGATTAGGTCCTGGAGTATATGCGTTCGAGGTAAATTCT
TTGATAAGTTCTCTACGTGTAATAGAAGCCATTTTATATTCCTCATGTTGAAAAATTTATTATACTCCAA
CCATCCTTGGTTGTACATCATTCCTTAAGAAGTTTTACTACTTGAATAAGATTAGCTCGTTCTGTTTTAT
TTTTACCGTTTAAGCCTGCTAATCGTGAGATTTCATCGTCAGTCTGTTGAATAGTTACATTAAGTTCGTT
AATCAAAGCTTCAAAGTATTTGATTTGCTCAGCATGTTTTGATTCAAATTTCTGAACCGGAATAACGTCT
TGGTTTAGTTCGTCAATAAGGTCTTTAAGAGCATCTTCTTGGTTGATATCATATTCAACTTCTTTTATTT
CTTCAACGAGCTCGTCTTTATATCTAACGTCTTTTAGTCCTGGTGCTGGTCCTGAAATCTCTTCTTTAAG
AGTACAAACATACCCAATACGGTATCCAATGCCGTCTCGCTTGATATCAACTTCGTCGATAAATCCACAA
TGTTTAAGACCAGAGCCGATTAGGTTAAAATATCCTTGACGTCGTCCTTCAAACGTTACACGAACTACTA
AGACGGTTTTGCCACCGACCTTTTGAAGCTCACATTTATAAAAGTCAGTTGAACCTGAATAACGTGGATG
AGTTTTAAAGTTCATCTGACGATCTAGGCCCATTTGTAAACGTGCTGATACGGCCAGAAAACGTGTTTGG
TTCTCGTTAAGATGAGCAACAATCTGTTTCAAAGGCATTTTACCCTGTTCACGTCCGAACAAATCAGTAC
GTCCTAGATTACGCAGGATGTTGTTAGAGTTAATCATCGACAGAACGTTAAGTTTATTCAGCGCGCTGAA
GATTCCATCAGCCATTGATTTTCCATAACCTTTACACGCTTTAATAAGTGCTCGCGGCAGATTAGTATAG
ATTTCAGACGGCATATGAAAATCAAATTTACTAGTCAGTAATTGATGAACTTGGATAGCAATTTGCTCAT
AATTAAGTGCTCTGCGATCGTTATGGTCTTTAAACCACACTTTAATCTGTGAAGCACATAAACCGTTAAT
TTCATGTTTTACCGCATCAGATGTAATGCTCATAACTATTTCCTCAGATTGAATTGGAACTCAAAACCAT
TATAACCCGTCCTTGGGTAAAGCGTTTATGCGTGAACCGTCTTTAAACGTTCTTCAAATTTCCGAAGAGT
ACTAATACGTTCTGCTTTCTGTTTTGTATAGTTTGCAATACGTTCTGAAGTGAGAGCGTATCGTTCGTTT
ACTGTTTCTTTCATGAAGTCAGGGATTTCACGAGAATCTCCAATTTCATCAAACTTATCGAGTACTGCCT
GGTCTTCAGCAATTAAATTTTCGTACATCTCGATATCTTTCTTAATAAACTCGATATCTTCCTGGGTTAC
TTTGGATAAACGAGATGCTTTATCCTTTTTGTGCTGTTCGTTAGTTTCACGAGACCAGAATAATGTACGT
TTTTTGTTAGTGTTTTTGTAGACTTCCACAATTCCAACTGAATCGATGATAACAATCCAATTCCAGCGAG
ATTTGAAAATCTGACCTCCGTCCACGGTAATCTCGTTACCATAAGCAACGTCATTAAAGAACTTGCTTTG
TGCTTCAGATTTAAATTTACCGTCGTTATAATTTACCAGGTTGAAAATATCTTTAGCGTTCATGTTTTAC
CTCCAGTAGTTGATAGGTCTATAATAACATAACCATAGACCTTGTAAACAACTAAAAGAAACTTTTTTCG
GTATTTTTTCCACTGAACCAAACTGACTTCGGGATTTTTTGTAATTTTTCAGATTTAAGTTTCTCTTCCT
GTTCTTTCTTATATACACCCTTGTCGTACTGGAGCATCTCTAGGGCATTCTTTTGCAAACGATCTAAGGT
AATTAAGGCTTTAGTTTTTCCTTTCAAGGAAGAGTCTTGGCGAACCTCCTCGCTATATTGTTCTGTTGCA
CTAATCATACGATGGGCATATAATTCACGACGGGCTTGGATATTCATAATTTCCTCATTTCAGTAAAGTA
ACTTCCGAGATTTCCTCCCAACCATCTTTATCCAGTTGAAATAAAATCTGCTACATAAAGAGCCGTACGT
AATGATACATTGCGAAGACGAGATACGTTAGCCTTCATCCAGGACAATGCTTTGTACGTTTCTGCATCCG
TCAGGCCACGTTTCTGCATCATGTCAGTAGATAATATTACATCTTCAACTCTGACCATAATCTCTTCATT
AGAGTGTACTCCAAGGTCCAAATACACTGAACGAGATACTAAAGCTTGAAGGTGTGGAGCAAGTTTCGAA
CCGCGTTCTAACTCTTTATCGATATCAACGTTTGTAATGAAAACGATAGTACCTTCAAACTCAAATTCTT
TATCGATACCCTTATCATCAAGATAAGATGATGCAGTGCTCCAGCAAACTTTGCGTTTATCACCAGTATC
TAATGCGGCTTTAAGAAGGTTCAAGATATCCATATCTGAGAATACGTCAACGTCGTCGATTAAGAGAACA
CTGTCTGCATCACGGTTGAGCCAAAGTTGTTCGTAAAGGCCAATACCAGAGATTTTGCCATTAATGCTTT
TGTATTTGATGAAACCATTATCATTAGCATTATTAAGCGCTTTATCCAGAGAATACGTCTTACCAATACC
TGCTGCACCTGAAATAATGAGTGAACGAATTTTGCCATCAATAATGCCATTCGTCATCATGTTCATTACT
TTAAAGCGTTTGTTGATACGAGTTTTCATATCTTCAGCGCTTTCAACAACTGCAACTGGTGATGTCTCAA
CTCCTTCCATTACGATGTCTGATTTGAAGACCCATACTCCACGTTCAGAACCATCAATCATACCGAAAAT
TTTACCGTCACCTAAGTGGGAACATTCAGGATTAAGCTTTGCCGGGAACCATGTCTTTGTGGCAACATAA
GAACCAGAGATTTCGTTATTACGATAGATACCTTTTTTGATTTGAACGTTGAACATTTTATTCTCCAAAT
TTACTCATTTCGTTTCGATAGGTCTATAATAACATGTTTAAAGCAAAAGTAAACAATTATTTGCGACGAG
ATTTTTTGGTAAGAGGTTGAAAGAACACTGCTTTACCAGCAGGAGTCAAAGTGACTCGTAATGCATTACC
GATTCCCAAGGATGCTTTAACCAGACCTTTAGATTTCAGTTCACCGAATGCTTGACGTTGGTCTGCATCA
CGAGTGTTAACCATAAGACCTTTATCACCAGCTTCACGAATCATTTCTAACATTTTGGTTTTCATTTTGT
TCTCCTCTTGTTTTGATAGGTCTATAATAACATATCCTAAAAGCATGTACACTACTTTTTAAAAATATTT
TGACCCCCTAAAGGGCCCGAAGGCCCTTATCATTTATAGTACGAATTGTGGTTTTCTAAGTAGACTTGTT
CAAGGAAGTCGTCCCAGAAACTCATATCTACTTTTTGCTGCATACCGTTCTTAGCAGCTTGTTCTGCCGC
ATGTTCAACTTGGTCAACGATATCTTCTAAGAATTCCTGTACGGTTTTAAACGTATGTTTACCAAGCTTA
ACATCGAGAATAAATGGAGCATCCTGAAGCGGGTAAACCAGGTCGCCGGTTTTGTAAATTTCTAAGAGCT
GAAGTCCACCACGGCATGCATGACTCAATGCTTTCCAGTCAATACCTTCGTTAGCTTCTGCCTTACGAGC
ACGTTCACCATAGTTCTCTTCCAGTTTAACCAGGATGGCATTGAACTCTTTATTGGTTAACGTATCTTGG
AATTTACGGTCTAACAGATTATAGAATGTTTGCTTACCTGTTTTCTCGTTTTCAGTTTCAACCCACGAAG
CAAATTCACCTACAGGCAGAACATTCTTCATATGTGATAAACGAATTACTGCACCATTATCAAAGTATTG
TCCCCATTCATTAGAACGTTTAAGGGCTTGACGAAGAACAGCCAGTCGAGAACCCTTGACACCGTATTTA
GAAGCTTGCTTACGGACATACCCTAAATAAGATTTCATGTTAGTGGTATAGAAACGAGACCTGTTATCTT
GAATATACTTCCATACATCAGGCAAATCAGATTTAACTACTAGACTTTGTGGAGTGTGAAGCATATCTAA
TGCGACGGTTTCACCATCTGCAGCTAGTTTAAAGAAATATTTGAGACTATACAGCTCATGGTCCACGTCG
TCTTTTGTGTTCTTAGAAGCAGTGTTATTCGTGTTCTTGCTCATGTGTTCTTTAACGTTACCGGTCAAGA
TATCACGAGCATGAGGGACATAAATTTCTTTAAAATCAACGTCAGATTCAGGAGTAGACGTTCCATAAAG
GTGGCTACCAAAGTAGCCTTTCATAATTGTTTTCATCATTTAGCCTTATATTCAAGAGTAGGACAGACTT
TTTCTTTACGAGCTTTAAGGTATTCACCTATTAATGATTTCTTACGTTCAATAGGCTCAAGTCCATTTTT
AATTCGTTCTTGGTTTTGTGCAATGAGCTCAATTTCTTTATAATATTTTCTGTCGTTATATTTGTCTAAC
AACCAAGACGGACCAATTACCAACCCGGTAGAAATAAAAGCCATGACTGCTACAATTAAAACGCCTACAC
CAATTGAGGCTGGAACTAATGTCCATAGACTGCTAAAAACAAAGAATTTAGTTAAAATTTCATGGCCAAT
GATTGTGACTGCTGCTAAAATCGCAAATCCAATAATCGAAACAGCCAATACCGGGAGAAATGTTTTCCAA
AAATAAGAACACAACGTTTTCGGGCGATTCCATGTACTATTGAATGCGGCATAAATTTTATAGTGCCAAG
AGTTTTCATTGATAATCATAATAATTCCTTATTTCAAAGTCGGGATAATAGAATCAAGATAAGCTTTAAG
AGCAACTGCTTCATCTTTGTCTAATGTAATGATATGTTGACGAAGGTCATCAATTTGGCGAATAACTACG
ACATCACCGTCTTCATAAGAAGGATTAACGCCTAAGACTGTTGTATAGTCAGGGCGGTCCTGATTTGTAA
TAAAAGCATTACGGCATTTAGCCCATTGAAGTTTGGCTTTTTTGACTGTTTCAGATTCCATGAATTCTTT
CACCTTAGTGACGAATGTTTTCCAATTATTAATAGAAAAACATTCGTCTTCAGTTTCGATATTAACCCCA
CTATAAAGTCCGTGATAAAAACGAACTTGAAGGTCTTCGTCAATGTTAATTACAGATGCATGGCCTGGTG
GATTGAGTTTCAAAATCTTGTCCAGTTCCATAGGAAGAATAGTAACAGCATCATCTTCTTGTGTCAGAAC
GTAAGCATAACCACGTTTTTCGATACATAAATCGCCAAACAACTCGGTTGTTTCAATTACAGTTTTCATA
TTATTCACCAATTAAAGTTTCAACAAAATTCACCAAATCATTCAGACAAGCATCAACCTGATTTTCATAA
AAGTCTTCGTTATCATTTACTGCATGATAAGCTACATCATTCAAATCTGATTCGGCCTCACGTAAGTGAG
GGATAAGTTCCATCAATTTATTAGCTTGTTCACGGGTCATTTTACCATACTCGCTTCAATAAGATTAATT
ACACCATTTACCATGTTATACGTAAACATCGGATAATTGTATTGTACTATAACATAAGCGATAAGCAAAA
GTTTCATTTTGTTCTCCATTTGTTTTGATAGGACTACTATAACATAGTCCTACCAAGATGTAAACTACCG
ATTGTGTTTTAAATGTTGATAAAGTTCTTCAACTTGTTTAGGGTCCAAAACAATTAAGTCATTTTCTTGG
CGAAGATAATTCCATCCCTTATCCCCAGGGCCATTTTTACAAAACATCACCGTCGTCATATCATCATCAG
CGCTTTCAGGTAAAAGTTTAAGTACACCGTCTTCAGATTTTCCAGTATAATCGTAAAGCATAATGTCCTC
ACATAATCTCGTTAACATACATTTGCAATTCGGTGTGGGCGTCGGCCATCTTTTTCATAGCTCTGTTAAT
GTCGATGTCTCCATCTTCGCAACCATGAGCATTTTCCCAATCGGATACAGAATTAGCATACTCTTCAATC
AAAAACATCAACTTAGAAATCTTTTCTTTACGTGTCATAACGTTCTCCTCTAGTAAGTAAGGACTACTAT
AACACAACCTGAGGAGAAGTAAACTGATAGATGCCAAAAAGCCCCAACCTTTCGGAAGGGGCTAGTAAAT
TAGATAGATGTAGGCTCTAATTTTATTTTCATGAACTCAGCAAATTTTCTGGCAGTTTTTATGCCTTGTT
CATGACATTCAAATGCATCATCACAGGGGCTATTTTTGTAATGCTTTGCCATATACTTATAAAATTTTTC
AGAATTCTCAACATTTTGAATTTCGAACAAAGTATATACGTTTTTAATCCCTGATTCCATAAAGTTATCA
AAGTACGGGTCAACATATGCAGTGCCAACAATAGGAGTCGTTGCTGCAAAAAACCCCAGCATCGCCACAA
TGGCTATCGCTCTTAAGGCCATATAGGCCTCCTGTTAATTTTGGCCAGTATTTATTTTTCGCCTTTGGAC
GGCCTTAACATCTGCGAGGTATTTTTCCAGCTTACGCTTACGAGTATAATCTGCTTTAGAACCAGTTTGA
CGGATATCCTCATTTAAATGAGAAATAGAATGTCCTAATTCTCTTCGGATTTCATCCAATTGGGTTACAG
TAAGATTACGAAGTTGTCTTTCGTTTAATTGCTGCATATATACCTCTTGGTTAGATATTAGTATTTATAA
CAACCCTGTCAAATCGTTCCAATGCTTCCGGCATAATGACACGTATCTATCGGTATCACCAATTTCAATT
TGACTGCCATCTGTAATTGGAAGTCCGTCTTCCGTGACTCTAGCTACCATTGTGGCCTTTTTACCGCAAT
GACAGACACCTTTAAGTTCAACAAGCTTATCGGCAATAGCCATTAATGCTTGAGAACCTTCAAATAGATT
ACCTTTAAAATCTGTTCGTAGTCCGTATGCCATTACCGGCACATTGTATACGTCAACAATACGACTAAGT
TGATACACCTTTTCAGTAGTTAAGAACTGAGCTTCGTCAACAAATACACAGTGAATATCCTTTTGTGCTG
CAGCCCATTTATAGAATTCAAAGATATCCATGTCTTTTGTAATTATATTGGCGTCCTGACGAATACCAAT
ACGAGAGACTATTTCACCTTTTGAATCGCGAGTATCAATAGCCGGTTTAAGAACTAATACACCCATGCCA
CGTTCTTTATAGTTATGTGCGGCAGTAAGTAATGAAGCAGACTTACCAGCGTTCATAGCGGCATATGTAA
AAATTAAACTAGCCATAAGAGTCCCTTATAGTGAATTCACGTAGTCAATGAGTTCTTGTTCTTTCCTGTC
AAATGATTCCATCAATGCGTGATATTCTTCATCTGTTAAAGGAGCATATTCATCGTACGCATTGGTGGCT
GCTTGTTCATCCAATAGGTCATGGATAAGTTCGAACAGTTTAGCTTTCTCTTCTTTAGTTAATTTCATTT
AGGTTCCCAATCAACAATCACAATTTCTAGTTTAGTGGAATACGTATCTAAAATCTCTTCGATGACATCC
CAGTTTCCGCCACCGATACCTGCACCAATTCTTGGCATATAAATTACAGGCTTTGTTATCTTATTCTTTC
CGAATTCATTTAATTCTATTATACAATTCATTAAAGCAGAGTACTCAAAATTAGGTCCCGGCTCAAACTG
CGTATAAAGATTAAAGCAATAAGCTTTATGGGTCTTAAAATATTTTTCATAAACCGAATAAGTCCCGAGT
TTAGACTCGTCTCCAAATTCGGTTTGAAGTTTATCGGCTTCCAGAATTTTTGGATAAGCCTTTGCTAATT
GTCCTGCCACACCACCGCCCATTGTATGAAAACAATTACATCCATGAGCAATATTATTACCTTTAGAAAA
CAGGGCGACAATATCGCCCTTGATATAGTTTTTAATCACTTGCTGCAAGTCCTCTAGTATAAGAGTCAAC
TAGACGGTCCACCATAGAATTGCATGCTGCCTTATCTTTAGGTTCCGCCACCGAGCATTCTAATATTTGC
CATTTTTTATAGTATCTTTTAATTAAGGTAGACGCCTTGAACCTACTAGACGCCCCATCTTTTTCTCCGT
CTTTATACGCATATAACAATTTTTGTGAAAAATCTACTTTACACTCTTGACTTTTACCGCAATAATCAGA
CGCCGTTCTGTTTGTATACTCCGTTACATCAGTATATGTAGTATTAGCAAGAGCGTTAAATGAAACCAAG
CCAACTATTAAAGCCAACATTTTGGTCATTCTTTTATTTCCAGTAGTTTATTTGATTTAAGGTAATTAGC
CTTTTCTAGGACTTCAGAAGCATATTTACTTCCAGCACTTGTCTTCCATCCCGCATTATATGAGGATATA
GCTTTTCTTATATCCCCGTTATGTATATTTAACCAATAAGAAAATTCGATATAAGCCCATCTGGCTGAAT
TAGACCGCTTAGATAGCATTTTCTTAATTTGGGCGTCAGTCATATTATAACCAAGCTGGTTAATTCTTGC
CCTCATTGTCGGTAGATAATTTTGGAACATTCCATACGCATGGTGACCTTTCTTATCTTTAAGATTAATA
CCGGCAGATGATTCCTGCCATAGTATTGCGGCCATTATGTATCCAAGTCCTTTCTTATGCATATTTTCAT
GCGTTTTAAATTTTCCGTCCTTAGAAAACTGTTCCCCAAACTGATAAGCATAATTCAAGTTATCGAGTTG
GACATTACTAAAAGTATGCTCGGAGCTATGTGCTGATAACGAAAGAGCAAATAGACCAGCGAGTAGTGCT
TTTCTCATGTTTACCTCTAGATTTTAATCACTGCTTTAGAAGCTTTTCCTGGTAGTCGTTTACTGTTAAT
AATAGCCATTCTGCATTGAAGAGTCTTCATTTTGAATGCTGGATTTTCGCGACAAACTGTAAGTCCTAAC
CAAAGATTTCCATCAGTTATTTCTAAACGGCCCGGGCGATATTCGACACCTTCGACAAAATCTTCATCAA
CATCTGGACGTGCCGGCATTGATAAAAATTCTGCAACTTCTTTAACATGATTTTTTACTTTATGAAATAA
TTCAAAAACGTAATTCTCATCTATTTCTCTCTGGATGGCACGATCTAAGAGATGTTGAGAATACTTGATA
TGAAAGCCTGGTAGTCCAAGAGACTTTGCAGCATCTTTTATACTGGCATTTATTTTGCGGAACTCCGTTT
CAAAGATTCGACGGAGTTTATTACGGCGGATAAAAACGTCTGAATTGATAGTCATTTTGATTTCTCCTCT
AGTTGACAGGTCTATAGTAACACAACTAGAGGAGAAGTAAACTACTTTATTGATAAAATGAGAGTTAAGG
CCCAAGATTCTTTAGATACTATATTGGCGAAGTGCCTCATCTCTTCGATTTGGCGACGACGCTGGTCAGC
ATAGTCTTCTTCGCCTTCTTCCTTACAATCTTCAAGGTCTTCTTCAAGATACTTTAAGTATTCACTACAA
ATTTTGTTGACCTTTTCCTGGAAGTCCAACAACCCAGTAATAGTAGAAGCCATTAGTATTTTTCCTCAGG
TCGAAATACTGCACGACATGCCCACATGCTGGCTTCTTTTAGATGTTGCTTAGCATACTTAAGAGCCTGC
ACTGCATCCATATCTTCTTTGGTTTGTTGCTCTGTTTCATTTTCTTTCAAGATATATGCTTCTTCAATCA
GAGCATCAAACATCAATCCAAGACGGACTTCTGCATCTTTAATAGCGTTCACTTTACCGATTTTATCATC
GGTATGCGGCTTGTAGCCTTTGATGTCTTCAATCGACATAAGGAATTTCCTCATCGGTGGCAAGGTCATA
TTCGACCAATTGGATAGGCTCGTTAATACCATATCCACGTACAGTGATATCGGTTGTCGGATATTTTCCA
GTAATATCACCCATTCTAAATGCTTCAGTGAATGATTGCTCGCCTGAGCAACTAAACCAGGCGGCAAAAC
ATTTTAAAACATCTTCAGACCCTTCTATAATCAATTTAGCCATTATAGACTCTCAGTAAAGGTACGAGCG
ATAACGTCGCGCTGCTGTTCCGGAGTCAGAGAGTTAAAGCGAACTGCATAACCGGATACACGGATGGTCA
GCTGCGGATATTTTTCCGGATGCTTAACTGCATCTTCCAGAGTTTCGCGACGCAGAATGTTAACGTTCAG
GTGTTGACCACCTTCAATTTTAACTTTAGGTTGATGTTCAATTTCAATTTCACGGGCATTCAAACCGTAG
AAAATTTCCGGGTCTACAATAGAGTCTTCTTTAAAAGTCTTAGAGACAATAATCCGGGCTTGAGTACCGT
CTTCAAAATAAATAGTGCCTTTATGTGCACCTTCAAGAATTTGATATGCTTTCATATAACCTCAATTAGA
AAATAAATTTATCCAAGTTTTTTCTTTAATCAAAAATGGGTCGGAATTAAACGCCATTAAACTTTGAGTG
ATTAATCCCTTAAATGGCCCATCAATAAATTCCATTTTGAAATGCGGAATACTAGTCATCAACCGTGCAT
TAGGAGCAGTACAAAGAACCTGCTGCCCTGCGAACGGACCTTTAGTCAAACGGTATCGTTTAGGTTTAAA
ATGGTAAATCTCGTAATTTTCTACAAGAGCCCTTTTATTGCATACTGGGCTGTTATAACAATATTCAAAA
ACTTCAATAGTGGTCATCATTGCATTCCAATCACAAAAAATTGAGGACGAGCAATACCGCCGATGCAATA
TTTGCTTTTGCAACAGTGTTGGACTGTTTTAATATGTATGTCGTAAATCTTATCCATATCAGGAGCTTTA
ATAGGCTCGTCAATTATATACAGAATACGAGAAAGCGTTAATCCACGGAATTTAGAACCTTCATTGCCAA
TAAAACTACGAACAGAATCAGTAAATAAACGGAATCGAATATCGTCGCTAGAATAACGAGAAAATTCTTT
TTCAATGTTGCCAGCAGAAATTTTAGCATAAGCTGAAGTATTAGAAAGAACAATAACTGTTCCACCATCA
TACAGCCAATTAGCAGCAAAGTTAGTCACAGCAATTGATTTACCTGATTGTCGGCCGCCGTCTAAACGAA
GTGTACAGTACTGCTTGAGTACGTCTTCAAATGGTGGGACATAACCGTTCTTACAAATTTCTTCTACTCT
AGCATCAGAATGGTGTGTAAAAGCATTCATCAGGGATAGATAAGGTCCAGTTAAAAATGTTCTCATATTA
TTTCTCTTAAGGTTTTGGCCATTCCGTGGCACATGTTAGGTCCTTAGACTCGCTATGTAAACCCATTACC
GCATTGCGCTCGACCTTATTACAGGTTGGAAAAGGTACATCACTCAGAGGACTCGACGTTCATAAGGAGA
GGTTGCGTTTCCCTTTATTAGGCAAGAATTATACTCTAGGCTTTTGAGCTTGTTTGGTATTGGATTCCCA
TGCGGCTTTGGTAATTTTGTTAGCGGCATAACCAAAGGCATTAGATAGAACACCTTTAGAGTTGAATACA
TCCAATCCAATAAGTACACCGGCTGTGTTAAATTTAGGAGCAAAGTACGCATTAGTTTTAGAAAGAGCTT
TTTTCAATTCAGGGTCTTGAACCAAGCCATCAAAAACGCCTTTACTATTTACTTTGTATGTTACTTTGGG
ATTTTTACCTTCTTCGATAGCAGCTTTCTGTTCCGCAGATAATGTAACTGCAGCGATAAACTCCTGATAT
GTTTTCATTTTGTTCCTATTGTTTTAATTTATGTTATTCTTTAGGGAAGTTTTTAGAGTATGCATCATAA
AGTTTATTACCAATACGACGGAAGACTTTCAGCTGCAAAACGGTTTTCAGGGTTTTTAATCATGATTTGC
ATCATGTAAGTTCCTGCATCCGAAAGAGCTTCTTCATAGTACCCATTAATTTCTTTAAGAGTCCTACGTT
TACCGCCAGGACCGTCAACAGTAATTCTCCATTTACCTGTAGAAGTGCGGCTCGGTGGCTCAACTTGTTC
AATCCAAATATAACCACCTTCAACGCGTTGGTTGGCGGATTCTGCAATAAATTCTTTATACGTTTTCATT
TTTGTTTCCTTGTTTGTTTTGATAGAGTAATTATACCATATTAATACTTAAGCGTAAACCGTTTAAGCTT
GACCGCCAGAAATAATTCCGAAGTTGTTAAAATCGTATCCAATATCGTCAACATCTACTTTAGGACTTAC
TACAACATAAGCAATTTCACTACGTTTTGCATAGGTGTTGATTTCTTTACCATCGCCACCTAAGAAAGAA
TACCCATTACGTTTTAATGAGCCAAAATCTTCCGCATCACCAATGAAAGCTTTAACTTTAAATTTAGGGT
CTTTGGCATCTGCTTCAATGATAAATTCTTGATACATTTTCATTTTTCCTTAGTAAATTGATTTACCATA
GTATTTGTACCAAGTCGGACGTTGAGCAATTTTTTCATCTAAGCGTGCTTGACTTATCGCAATGGACGCT
TCGGACGGGACATAATTATTACGAAATTCGGCAGGGATGTCGGAAATATCCTGGACAGTCGTGTCCTTGA
TTTTGAAACCACGTTTCAAGCATTCAGCGATTAGTTCGATTTGACGTAAACGTAAAAATTCGAGTTTGTC
GTAAAAGAATGTTACGTGACCTGTGCCTAAGATAAATGTTGGAGAGATTTTAAAATCCTTTACACGTTTA
CCGTTTTGAACATGTTTACGGACTGCACCAAATACGCGTGGTAATTCACGATACTCAGCCATAAGATGTT
GGTCGGTCAGTTCAGAAACAAGTGTTAAATTGATACGAGTCATAATTTCCTCCAAGTAGTTGATGAATGT
ATAGTATCAAAGTCCTTGGAGGAAGTAAACACTATTTTTCTGAAGCGCCTGAAATATATTTTTCAAGACG
TTGTTTCATTAGCGAGCCGTTCTTAGCGATTTCTTCCGGTTTATCGCACATACGCAACAAGGCTTCAAGC
TTAACGATATCACTGGTGCGCTCAAATTTGCGAGTATCTATCTTGCTAGCAAGTTCAGAAATACGTGCTA
ATAGACTTTCAGCTTCAACCAAAGCTGCACCTAGCTTCGTGGCAAATGTGTCAGTAGCTTCGTTAAGAGA
TAGATTCTGATAAAAATTCATGTATGTTTTCATATATACGCTTTCCAAGTTCCTGTTTTAAATGTTGAGA
TTACGCGTTTCGCGCGATTAGGTGTCTGACGATACCATTTAGATTGGGCTAGATTTACTGCCGCTTCGTC
CCAACGTTTCTGTTGAAGCATACGAAGAGAATTAGTAAAACCGGCGACGCCTGATACACCCATTTGGAAG
ACCATATTGACCAATGCACACCGACGAACTGCATCTAAAGAATCATATACCGGTTTAAGTTTAGCATTAC
CCAAGATTCCGCGAACGGCTTTATCAACGTCTTCATTAAATAGCTTTTCAGCCTCATCAAGGGTAATTGT
ACCGTTGCATTTACGGCCGATCATTCTGTCAAGTTCAGCTTTAGCTACGGCTAAAGACGGGTTCTTTGTT
ACTAAATGGCCTATGCCAATCGTCCAAAAGCCTTCAGTGTCTTTGTATAAAGTCAGTCTAAGACCTTCGT
CATTACGAAGCATTTCAAATATATTCATAATACCTCCCACGTTTATAGGAGGTATTTATTACTTATAGGA
GGGTAGTGAGCACCTTATATAATGATTTGCCCATTACATATTCCCATTGAGAAGGTTTAATTAAAGCGAA
TGCATCAAATTCAGGAATCTGTCGTCCGTCTGGGAATGTATGATAGGAATTACAAACACTGTTTCTGAAT
TGCTCGTGCTCTACAGGGATGGTATATAGGAACAGATGAATATTCTTATTGTCTGAGTAATGATGTTCAC
CTAGGTCTTTCAGGAAGGCAGGGTCATATTGTGTAAACCCAGTTTCTTCTTCGCATTCACGAATAGCGGC
TTCAATAGGAGATTCGCCAGGTTCGACACGGCCTTTAGGAATATCCCACCGATGAGCTAATGCACCTTTA
GGACGAGAACCAGTTACACGCCCCATGAATAATTCTTTATCTTCGGTAAGGAAAATAATACCGGCTGATA
GTTCTTTCACTTTATTTTTCTTACTCATCATCTCGGTCCCATGATTTGGCCATTAATTCGGACATAAATT
CTTCAATGCGCGTTTCTTTAGATGGACTTTCACTATTAGAGACCGCAAGTTTGTAATCTGCAATAGGACG
GAACAAATCAAGGTCCATATCAAGGTCGTCTTTGATTTGTTCTTCAGGTACATCTGTATCATACGTATAC
AGATAACTATCAAGTGATTCTGATTTAACGTAAATTGCTATACTCATCTCAAATTCCTGCATTCGGTAAT
AAAACGTTCAACTTCATTATTCTTGGCCTTTATCTTGTCTTTACGTTCCTGTAAACTACTTTTAACAAGA
TTAATAATGATGCCTACAGTACCTCCACCAATAATACCACCAATAATACTTACAATAGTAGATGCTAATA
AGATAGCGATAATATCTGGTACAGCAAAGGCACTTACTTTAGTACTAAAAAACCATACCGACGGTACAAA
TATAATCCATCCTGTTATCCATTGGCACTTATTGAAAAACTTTTCAAGCTCAGCTTGGGTTGTTCGTATT
ACTTCATCGATAGGTTGATATCCATTAATGTATCTGTTCACGATAATACCTGCTGGTTTGTCGATTTTAA
ATGCTTGACAATGGTGTTTCACTAAGTAGGATGGACATCCTGTCCAATCTACTGAATAGTATGAAATACC
TTCGTCGCCACCGTCCATGTTTGACCAGTGAATTTTCTGTATCATTACCAACCTTCCATAGGGAATTCCA
GATAAACTTGAGCGTTGACACGAATTTCATTGGTAATCTTTTTAACTCGGTCCGTATTACGAGATACACG
TCCGAACCAACGCCATCCATTACTAATTGCACGAGAACCAGTGTGCCATGTTTGCCAATCAAACTGAAGA
AGAGTACGGTCTGGAGCTTCCCATTTCTCTAGTTCGCCTTTTTCGATTTTTTCGAGGACTTCTTTGTGCC
ACTGGCGATAGATAAGTTCGCCATCAGGAATCTGACTGAACTCTGCAGTTCCTGTTGCAAAATGAGTAGG
ACACACATCAGCGTTAACAAGACCAAGAATATGTTCAGACAAATAGCGAGGATTGTCATAGTCAGGTGGT
CCTGCAGTAATAAAGTGTTGACCAACCGGAATATCTGGGCGTGGTACATCGTCATGGTGATAACCTGGGA
TAGCAGGATACCAACCAGGCATCAGCATGTGGACTCGTGAATCAAATACTACATCCGAGTCTTTCCAATC
GTCAGGGAGATTTTGGATAAAGCTACGAGTAATTGGACCGCCGTTATCAAAAGCAAAATTCAAATCGCAA
TTAAAGAACATAGGCTCGTTTTTAATCTGGTCGTTTTTAATCGCATGAGCAAAACCACCTACTGCACGAG
CTTGACTATTAAACACTTTAGAACTATTCATATTATTTTCCTCGACATTCTTTAATGAAATTTTCTAGAT
TGGTAGATTCAATAGCTTTTTTACGAGCTTCTGCGTGTTCTTCTTCAGACAATTTACGTTTATAATTGAC
CCAGACATTATGGTCGAAACTAGTCGTGGCATATAATAACAATGCTCCAACGAATAGCAAAAACGGCGAT
AAGAATACAAAACCAGGAACACCATCCATATCGTAAGCCTTTTGTAATACTGCAACAGAAAGGGCTGCGT
AAAAAAGTGATGCAAATATTGTTAAAAGACCAATTCGGTTGGTTTCGCCTAATTTCATAATATTCTCCTC
ATGTTTAATAGGACTACTATAATATAGTCCTATAATTGTGTAAACAGTTTTGCGAAATTATTTGAAAGGT
TTTACCATATGGAAATTTTGTTTGAAACGTTTGACGTAATCGTCATGTCCTAAACTTTGGTACATACTTA
CTACTTTGCTGTAGTTTTCCCAGGCATACTCACGGAACCAACCAGAGGTGATGCTTGTACAGACTTTTTC
CAATGCCATCATAAAACTGGCTTCAGGGTTAATTTTAAAGTCATTAGGAATTTGAGAACGTTCTAATGCT
AGTACACATGATTCTTCGTATACACCAGCCAATTTGACCATTTCTGGTAATGATTCGAACTTCTCGCGTG
AGGTCATGACTTCAGAGCCGTCTTTCATATAAAATGTATACGCTGGACGGTCTGTTAGTGCAATGGCTTC
ATGAATAGTATCATGGTCATATGTATAGATGTCATCTTTAAAGAACGCACTTTTAGAAGTGTCAAGAACC
GGGTGAGCATAGTTCAAGGTTTCTTTCTGGCGTTTCAGCATAATTTCAGTAAGTTCATCGTTCAGTGTAA
CACCTTTACCACGAAGATACTGAATATGGTTCATAGTCTTTAAAAAGAATGGATTATTTTTCTTGAAACG
ATGAGACATCTTAATTGCAAGACATATCTCAGGAGTTGCCCAGTAAAACCCGTTCAAACGGTCTTTAGTC
AAATTTTTCTTGGCGTATTTTAAAAGGTCATAAGAAGACGTGAAATCTTCAGGAGTGAGTTCACCGATTA
ATTCACGGACATTAGTGATTGCCGGAACAATATATGCTTCAAAATGAGTTTCGCGTCCATTATGGAAGCA
TTTGAAAACTTGGACATCAGGGTTATCTTGGTGAACATATACACCCATCATTTGATTTTTGAATGCATTC
CAAGAACATTGGTCCGCAATAAAGTCCCAATCGCTATTTTTGATAGCGCTAGAATCAATAAGACCGTGAT
AGTGAAGTGCACGAGAACCAATAACCAACATCATAATATTTTCCTCTGATTAATTCATTAACTTAAATTT
CACGACATGCGATATCATATTCATCCCAGAGGTCATCGTGTGAAGCCTCTACCAATGGAACGATTGTGCC
GTTTATGTCTTCATTATAAGGGCAAATTGTACAGTGCGCATCTTCGAATCGGATGCCTTTGTGTTCAGAT
TTTTTATAACGCATATCGAATATCTTTGCAAACTTTTCACGAGTAATGGTTTTAGCAACCACTTTGGTTC
CGATACTTTCGTAATAAATCATTGTGGACTCCATTTAATTTGATAGGACTACTATAACATAGCCCTATCT
TGTTGTAAACTGTTTTAGCAAGAATAACTAGATGATACCCAGCCTTGAACAGTAATACTATTATTTGATA
ACGAGATTGCGTCCTGGAGATTCAGACCTGCGTTATCTTCAATCCATAATGTAACTTCTTCGCGTTCTTC
TGTTGCAATTTGGAACAGGTTTTCCAGAGCAGCTACTGCCGTACGTACAGCACAATCTAATTCGCGAGAC
ATATTGTTTCCTTAGCAAGTGTGAGAAGATGCGACCCAACCACCAGTTTCGAGGCTCAGGTTGTAGTCGT
ATTGGTAAACGTCAGCCCATTCAGCATAGCCGTTTTTTGTACAACGTTCAAGATCGGCTTTAAGATGTCC
GGGTGAATGATAGGTTCCACCCATACCATAAGCTGGGTACAAGTCGAATGTTGTGTTTTGTTTATCAGCA
ATTTCTTTGGCAGCCTCAATAGCTGCATAGATTTTTGCTACAGCTTCAGTCAGTTCGGTTTGTTCTTTAG
ACATAATGATTCCTTAGCACAACGCAGGAGACGAAACCCAAGCACCTTCAGTAATAACGTAACCATTACC
TTCACGCTTAACATCGCCACCATTATTTTCAATTTCATTTTTCATACCACTGGGATACGATTTCACCCTT
AGGATAATAAGTACGACCGCTACCATAATCACCTACAGAAAATGATACGGCATATTGGTCTGCGATCTTT
GTTGCTTCTTCTTCGATACGTTCAGCTTGATTCAGAAGTTTATAAATTGCATCTGAAGCGGATTTGGCAT
CATTAAATTCTGGTACTTTAATTTCGATAATCTTACTCATTTTCTACATTCCTTAATAAAGTTTTCTATT
GTTTCATTTTCACGTTTAGCTAGGAGTTCATTATAACTAATCATTTGAGAAGCGTAAACCTTTTTATTTT
TCTTGTTATGGTTTATAAAATCGTAGTAAAAATAGACTACAGTACAAAATGATGCGATGGATGCAAAGGC
TTGGGTATACCGTAAGTCCTGCCATTGGTCTGTGAATCCGCCAGTGTTTCCTATAAATCCTAACACAACG
CCGTCAATAAGAAATCCAACTAATCCAAAGGCAAATCCCATGCCAATACTCATAATAAAAATTAGAATGT
TCTCACCAAGAGAAGGCCATACGGTTAAGAGTTGAGGCTTTTGCATCTTATTTCCTTAACGAATTCCATA
GCTTCTTCATATTCATACTTTTTAACAGCTTCATCATACTGAGCTTGGGCTTTTGCGCACTGAACTTTCC
ACTCACGAACTCGAGCTCTGTGATGACGGCCTTGGTGCCAATATCCTACCCAATTAATAGGCATTAATAA
AAACGGTACAATAAGTGGTGCGACGAACATTAATGAAAATGCTGCATCAGACGATATAACTTCACTAGAA
TCTAAAACAGCTCCTATAATCATAAAGATTAAAAATGCTAAAGCTAAAATAGGGCCAAATAGTACTTCAT
TAGGAATTAATTTACGTTTGTATTCGTATGCCCAGGGCTTACTTGGCATGTATAGGGTTGGCTTTGACAT
ATTCTCTACATTCCATAATAAATTGCTCAAGGATTAAATTGTTAGTGAAATTAGGACTAACAACCATAGT
TTCATAAAGCGCATCAATAGCACTTAAAGCATCAACTCTTTTAAGCAAAGGCTTGCCTTCATACATAGTT
TCAGAATCGATGATTAACGTAAAGTAATATTTTTTATTATCGACTAGAACTTCTGTATCGATATAAAACA
TATTAGACCTCAGAAGCTTATCTCTAAAACCATAATAATCTTCAGAGCGTTCGCTGATATATTCCCATTC
AGTGTTTAAACAACAAACAGACCATGTAGGAGCAACGAAATCAGTGAATCTAATATCATGGTCTGCAACT
AGTTTAGCAATAGCTCCGATATCATGAATCATAATACCTGGGGCTAATAAAGATTTTCTGCTATGGCTAG
CCGTTTTCTCGGTGGTCTCATAAGAAGACGACCAGTACCATTTACGTCCGGTTGCAACATATCGTAATGA
ATCAACTAAAGACGTAGGTGGATTTACCTTATCTCGGAACTCTTCAAACATTGAGTCAATATCATTATTT
TGGTTTCGCATGTTAACTCCTTTATTATCCAAAAGGAGGACCGGAGTCCTCCGTATTATTTTATTTCAAA
GAGTTAATATATTCTTGTACATCAGCAGAAGTGGTTTCGACACCAGCTGGAGTGCCATTGAACGTTTCAA
CACGAGTCAGAGTGTCTTCGATATCAACCTTAGTCAGTGCAGCGATTTCAATTACATCATCGGCCGTAGA
GATACCAAGGGCATTGGCTGCTCGAGTTTCACGAATGTATTCGAGTTTGATTGCCAGATTCTGACGAGCA
TCATCAAGTTCAACCACCTTACGAGCAATTTCAATTCGCATAGCGGCATACCCGTCAGCTTTTGTATTAA
GTTGTTCGGCAGTTCGACGATACAGAAGACCAAGCTTAGCATGCATGGTAACATCTTGTCCTTCAGCCAA
GAGCTTACGAATTTCACGTTCCTTAGAAGCGGCTTGCTTGTTCTTTTCATTAACAAGTTCGCGAATACGT
TTTTCTTCATTAATAGATTTAACAGAAGCCGTTTTTAGTTCTTTGATTTGGGTAATCAACTTATCTGCAG
CTGCGTTATACTGTTCTTCGACAGTCAGATTTTTAGCCATAGCAGTACCCAGTTTAGTGCGGATGAATTC
AACAAGTTTCTTCAGTGTGTTCATATTATTACCTTTCAATTGGTGGTTTATTATCCAACGAGAGCATTAT
ACTCTGCTCTCAAGAGTTTGTAAATTATTTTTTAATCAAATTGACATAAAACTTGGCGTCTTCGGGGTGC
ATGCCTTCGCAGTATTCTTCAACCATGAACTTCTTAACAGCTTCATAAGGACCACTCAGATTAAGCTCAG
TTGTCCAGAACTTGGAATCTTGGACTGAATCGATACGAACTTCAGGGTGTCGGTTGCGAATAACTTCTTC
GGTGTATTCATAATCAACGACATCAATACTAACTTTAGCCATTTTGTATTCCTCGTGTTTTGATAGGACT
ACTATAACATAAACTTACTTAGATGTAAATTATTTCAACGTCACCTTTAGCTGCTTTATAACCTTCAGCC
CAAGATACAACAGAGTTTTTATCTGAGGATTCAAATTCAGGCATTGGACTTTCACCAATATTCACACAGT
ATGTTTCTTCATTTTCATCGAACCAAATAATTAAAGTAGTCATTTTGTTTACTCCTCTGTAGTTGATAAG
TCTATAGTATCACCATCCTTGGTGCTTGTACATCATTATTTTTAATTTTTCCAACTTAACAACTTGTAGT
GTCCTTCATTCATACGTGGTTTATCCCAAGAAATACTAATATATGATTCACTGTCAATAGAAGTCGCCGG
GTTTTTCTCTACCGTAAGACCTTCACTTTCCAGCCATTCAATAGTATTTGCGCATAAATCAGAAGAACAC
CTAATCGGAAACCGGCAAGATTTTTCACCTTTAGCTGCAGCGTTATACATCTTTTCTAAAATACGCTTTT
GCACGTTTTTAAAAATAGTTTCAGCAGATTCTTCAGATTTTTTATTCAGTTCAGTATAAAGACTCATAAC
ATTCTTCTCATTAATAGGGCTCATAATATCTCAATCATAAGCCCATGTACGCGTTTATTTCATATTATCG
AAATATTCTTCAGCGATTTCGACATTATTATGGTAAACTTTAGAAGACAGTTTAACATAACCTTCAGCAG
TGAACATGTTAATCACAACCTTTACAGTATACCACTGACCATCTTCATTACCCATTACTGCGTAAGTTTC
AAACATCGGATGGTCAGGTCCAATAACTTTAATATCATTCACCGTACGACCGAAATCTTCTGGAACGCAT
TTCATAAAGAAGTTGAACAGTTCACCATAATTATCCATTTCATTCTCCAAGTTTTTTCTGTATCGGTAGT
TGATAGTTGTATAGTACCACGGAAGAACAGGGATGTAAACAGTTTTGTGAAAAAAATTTTTAAAAAGTTT
TGTGGAATTCTAGGGCAGGGAGAGGAAATTAAAAGGTAGGATAATATATTATAAAGGGTATAAACTAAAT
GATGCCTAGAGAGGCCCGGAAAGGCCTAGATACAAAAAAGCCCTATCATTTAGATAGGGATTTAAAATTA
TTTACCTAGTTTAGTTATTATAGCTTCGGCAGCAGCTTTTAGCTTAGATGCAGTGTTAATACGATTTTTA
ATTTCGGTATACGCATCGCCAAGAACATCAAGGCTATCAGAATAAACACTTACACTATTGCGTTCGCTAT
TTTGAATAGAACCTTTAGTTTTACGATCAAAATCAGTGTACACGTCTTGAAGACACGGGCTGCCTTCTTT
GCATCATCCAATGCATCAAGAGCTTTATTCAAAGCATTGACATATTTTTTAGTGTCAAACATATTCTTAG
AAATTTTAACAGGTGCACGTTCAGGAGTAGCTAAGGCGGATTTAGGAACCTGCGTGCCAGATGCCAGTTT
CTTAGAAATTTTGAAAAACGCTTTATTGAAACTATTTTCTTGACTCATCGTAAAAGAACTAGTATCGATG
TTATACATTTCAATAGCTTTAGCTTTCCACTTAAGAAAATCGCCACGGTCTTTTGGATCCAAGTGGAAGA
ATACTTTAGTAAGATCTGCTTCAGATGGTAATTTTGCTGCTTCGGTTAAAAATTCGGCATAGGTTTTCAT
TTAAAATCCTTGAAATAATTTATCGGTTGGTTATTAATTATTTATTACTTTGTTATTATCAGTAACAGCA
TTCTCTGAGTGATTCAAACTAAAAAGCCCCAACCTTTCGGAAGGGGCTAAGCCTCGCGGCAACCTTGTCG
GGGTTCCACCTGCTAAGGCAAGTGTTTGTACGAAACGCCGGGATTCGAACCCGGTTATTAAGCAGTTGAC
GCTACTCAATATTTTTAAAAGGCCATATCTCGACCATATCCGAACGTTCCGTCAAAAACGCTACTCGACT
TACGGCAAAGATATTTCCTCGAATCGATAATTCGGTGCGCCGTTTCTGCTGTGATGTAAGGGGATATTAA
CGAATCATAAAGATTTATTAAGACCAGTCCTTACTCAGGGAACATCAGTCCGACGACTTACCGGTAGCGA
CCCGGCTTCTTATTTTGACATATTATCAATTTGCTCTCGACGCCGTCGCCATAGATTAATCGCTTCATTA
ACACATTCGGCGTTTGGTATATGACGGCAATAATATAATGATTCGCGTTTCTGGAACCGATGTTGCAATG
GGATTTCGTTTAAAAGGTCTTTACGGTCAAAGTATTCAAAACTAGTTAACCCGGAACGGTTTTTAAGAAA
CTTCCAATGTCCGAATTCATTTTGAAAATAAACATAATCAGCATGTTGATATAATGAATTAATTAACCTA
TCGGAAATAACTGTTTCACGTTCGTTAAAATAAAATGTTAAATCATGAACTACTAAGTAAACATTGCCTT
TCATATTTTCCTCACTTAAAGTTGGTCGAGACAGAAGGATTCTAACCTTCAACCTACGGATTAGAAGTCC
CCGTTGCTCTATACAATTGAGCTATGCCTCGAATATATGACCCAGACCAGATTCGAACTGGTAACCTTTC
CCTTATGAGGGGACTGCTGCTAACCGTTGAGCTACAGGGCCTAAATAACTTTCTATTATGAAAGGCACTT
TAGAGTACCTTTGGTAATAGAGGGTATGAATTAATAATAACACATAATTCTTAAAGCAAATCAATCATTT
TAACAGTTGGCAAAACGATTTCTTCTTCAATATAAGCAAATTCAACACATTCAACTACACGCAAGAAATC
ATAATCATAATATTCAGAAGCATGACCAAGAATACCAATGAGACCTTCTGATACCAAATATCCATTCTCA
CGAAACAGGTCGAATACACACGATTCGTCTTCTTCAGATTTATTACCAAGGTCGACTTCAATATCAAAGA
CCTTTTTAATGAATTCTGGATAAAGCTGGTCTGAGAACAGTCCTTCAACCAAGTATTCATAGATTAAAAG
CGAGCAATCACTGAATGGTGTATTACCGCAATAACGTTCGGCTTTGGTGCTAGAATGACGGCTCTTAAAT
TTCTTCAAGAGATATTTAAACTGTTGGAGCTCATGCTCTTCCACTTCAAACAATGTTTTGGTTTTATAGT
TGTCACCATCATTTTCATAGGTAGTGACATCAATTACGTAACCCTTAGGAATTGTACTGCCTAAACAAAT
ATTCATTTACTCACCGTACCATATTAATGTAATTATATTCAATGCAACGTAATTTCAAAGGATTCTTGAA
AATATCATATTCAAGAGGGCCTTTTTCTGTTTCAATAAAGAAATCAAAGTTAACTGTGTTAAATTTATCG
TCTTCACAGAGTAATTTAACTTGCGAAGACGAACGGTCGATATAAACCTTTTCAACCTCAAAGTTAGTCA
GAATACCATAGTCATTAACTAGTGCTTTAGCTGCACGTTGGTCGCTTTCATATCCGTTCTCAATGGACGA
TACTTTAGCATAAAGAATCATGAATGTTCCACCACTTCAAAGGTATGAGCATCAACAATATGATACCAGT
CAAAATTTTCTTCTGCGTTTTTATAAATTTCGCGAAGAGCTTCAACAGTTTTTCCTGTAGCAACAAGATC
GTCAATACCGCCAAGAGGATAACAGTCGTAACCAGCAAACAGAAGGAAATTAATAGTTTCTGTAGGTTCT
GGATGCAGTGTACCATTGTCATCGACTACTTCAAAGAACATATAACCAGGCGATTTAGATTTAATCCAAG
CCCATGCTTGAGCTGCTGAATCAAATGGTTTGCGTATCAAACGACAATCAGGGTCTTTAGAAGGATTTGC
TTCAAAATCCGCATATACGTGATATTTCATTTTACTCACCTTTTGCAATTTTATCCATAACAATAGCGAT
TAAACCGATTAGAAATGCTACTACCAATGAGATAGAGTTTTCAGTTGTTGTCAGTAGTCCACAAATGAAT
CCTACAAACATCGAAAAACTAAAAGCCATTGAAGCAATTACTACAGCAACATTACGAATCAGTTCAGCGC
GTTTCATTTTATTTCTCCATTTACTCATTTTGTTTTGATAGGACTACTATAACATAGTCTTATCAGCATG
TAAACTACTTACAGAAGAGTTTTTGCAATAATTTTAAGCTGAGCTACAGAAATATGCTTAGCTTTAAACA
GTGCAGTCTCTTCAGCCGGAGAGATAACAATAGTAGCGCCATCTTTCTTAGCAGACCATCCATCCCCTAA
GTAAACAGTACCTTTTACTTCTTCGCCGTCAACCAGACTAATCATTGGTTTACCCTCACGTCCTTTATTT
GCTTTAATAACTTCGGAAGTAAGGGTTGCTTCGGTCAGAGTAGAAACGTTAGCAACAGGTGATATAAATT
CTTTATAGGTTTTCATTTTAGGTTCCATTTTGTTGTTTTGATAGGACTACTATAACATAGTCCTATCGTG
TTGTAAAATATTTTATGCCTTTAGATGAAATAGTATTCTGGCGTTTGACCCCTGTTTGTGAAAAATCATG
GTTATCAATTTGGTCAACTCGCATAACACCAAATGCAGATTTAATTTTAGCCTTTGAACCTTTTTTGATA
CTAATTACCATATAAGTATCATTTTTCTTATATTCGAAATTTGTTACTTCAACGCCTTGATTAGAAATTG
ACTTAATAATAGCATTAGCGTATTCATCATCTAACGGACCGTTAGTGTTAATAACAAAATTTTTATCTGC
TTTAGTAGCTTCCGCGATGAATTCTTGATAGGTTTTCATTTTATTTCCTTGAGGTTGTTTATTTGATAGG
ATGATAGTAACACACCATCATCCTTATGTAAACTGTTTTGTGAAAATTATTTTAGATCTTCGGCCCAATC
TAGTTTTAAGGGTTCTTTGTATTCACGGTCGAGAATAACCGGAATAGCTACATCACCACTGAATGATAGT
TGGCCAACGTTATATGATAACGTTATATGTGGAGTGTAGTCGTCGAAATCATGAGTAGCACCTAAAGCTC
GTGCGTACTGATGACGACATCTAAGATATTCGGAATCAAGAACTAAAACCAGTACAGCGCCGTCATCGGT
TTTCCATACCTCAAGGTGTCCTGATTCGGCAACAGAATAACTACCACTAGATGTAGTATATGGTATGTTT
ACACGTGAATAACAAATTGTTGAATGAAGCTTTTCACGTGGTACTGGATTAGGAATTCTTAATTTGCGCT
GGAGGTCTTCCAGCGCATCAAGTGTTAATTCCGAAAATTTAGCTGCGACGTAGAGGCCTTGTGAAAAGTC
CTCAAATTTCATTATTCTTCTTCTGTGGTTTCAGCTTTAACAAGTTCACGTACTGCTTCTACCAGGTCTT
CCAGTTTAACAGATTCACTTGTAATACCGACCAGTTGAGCAATCTGAGCTAGGGTATTCTGAAGAAGTTT
AGAATCGTCAGAAATACGAGCGGCGGCATCTTGGGTATCAAGAATACGAGATTTCAGAATTACGATTTCA
GACTGCAGTTTTTCAATAGTTTCAGTGGACATTTTATTACCTTAAGATTTTTTCAATTTTAGAATAAAGC
TCTTCTAACGAGCCGTCGTTTGTAATAACTAAGTCGCCTTCTTCAATAGGCAACCCAGCTTCTGTAATAT
GTTTATCAGTGGATTCCGTACCAGAGCGAACCACATGAATAACTGTAGCACCCATCGCTCTAGCGGTTTC
CATTTCATGGACTTGGCGTGTATCGGTCACAACGTAGTAATCGAAATCACTTCCAATATAATCCATATAG
TTTAATGCAAAAAGCTTAACCCAATACATACGGTCAAATAAATTAACGACAACATCCGTACCGAGGGCTT
GCATAAGACGGCGGATTGACCATGTGTCGTTGATATTATTTATAGCTTCACGCAGGGCTTCATATGGTTT
AATATCTAGATATGAATACCCACCTTCTAATGATGATAATATGTTAACACCATTAATTGGCAGGTATTGT
CGTTGTAAATAAATTAGCGTTTCTTCCATTAATTCAATAACATCCAATTTATTGAGATTTAATGGTGTTT
CACGGTCGTATCCAATGCCTTCAAAGTATTCATATTTCAACTCGGTGAATACATCAGGGTTTTCGGCATG
TTTACGCTCCCAAGCTATTGCTAGAGCGTCTTTAATTGGATATGCTAATTGATATTTTATGGATTTAAAG
TTTGAATTGATGTAATCAGCAGTAGTGTCTTTACCACTACGTTTGATGCCGCTTAAAAAGATTAGCTCCA
TAGGTTTTTCCTCATATAATTTATGAACGATTATAACATATGGAGCTAGAAGCGATTAGCGCAAGGAAGG
GTGTCTAGAAATGGATTTAGATTCGACCGCTTGACGCGGTTGTTGAGATACAATGACTTCACCATCCTTT
TCTATCGTCATATACGCATAGTGAATAGTTGCTACGCACGTAACGGCAGGGTCGGAGTCTTCAGTGTAAC
TAAATTCAATTTCGCTCAAATCGGAAATCCATGGTTTATAGAAATTTGCCGTCAAAACCACTTCAGTCTT
ATTGTTGTTTAAAATGTGCAAAGTAACAAACTCAGGACCATCGGCATGGGCTGTATTATGACCAGTTATA
TAGTTATTAGTGCTGAGCATCCATTTATACATGTTCATCCAGGACGTCATGTCTTCATCAACTATAAATC
GTACAATAAAAGGGTCATATTCAAATGTAGTGCCTGCACGCATTGCACGTCCTAACCCCATTGTGCCTGT
CACAGTTTCAACAACAGGAATTCTCACACCTGGCAATGGTGCCGTTTGGGCATTGAGCACAAAACCTGAA
GTTCGTGTACTATCTGGGATATCCACAACAAAGTTTGTTATATTTGTTTGGTTAAAAATCTGTCTCGTTG
GACGAGTCATAAGCACCTCAAAAACGCTTTAATAAAAATGCAGTATAATGGTTTTAGGTCTCTTCCATTA
ATCTGGTTCAACAGAATATCAGAAGAACGGAAGAGAATAGAATTAAGATTTCCAAACAGTATTCGCAGAG
AAACGTTTTCCTTTTGACATAAACTGCTGAGTAGGTAACATGATTATGTTAGCCCAGTCTTTAGGAGCTA
TTTCTGTTATTGTTCCTCTAATGTGGCCTGGCAAGTATGCTTTAATCATTTTGTCCGCACCTTGAAATCC
TTTCACCTTGCTCCAGTCTATCTTCAACTTTGTGTTATTAGTAATAGTAGTTGTGCTAGCATATTGCTTC
AGCAATTCTTCAAGAAACTGTTGTCGTGCTTTAGGTGGGATATAGTGCAAGTTTAACCCGTACATCAAAT
TATGTTTACCTAATCCTAAATAAATAATCAAAGGATATCGGTCCCAGTATGGCAGAGTATCTTTATGTTT
AGCATCATACACGTAAGTATAAATTTTGCCTGGCGCAGGCTTGACTACTTTATGACCTTTTACACTTTTC
TTAATTGTTTCAACAAACCACTTAGATGATTTGTTGTTTACTGCTGCGCCTTCATTTCTAATCTTTTCTC
GTATTGAACTGCGAAACGAGTTTATCATCAGAAGTTGACGTTCTTGCTTATTGAGTTTATTTTTAGGTTT
AGATTCAAGCGTTTCAATTTTCTGTGCAGTCTTAATAGATGATGCATATCTAGACATTGCAGATGTAAAC
GACGAGTATTTTATTCCTTTTGATTCTGCAAATGCTTTTGCAGTGATTCCTTTCTCTTTAGCTTTCTTGT
ATTCTAATCCTATCTCAATCCATTTTCTTTCATTCATAGACTGAGCAATCTTAGGGGCTTGTACGCCTTC
AGATATAATTTGGAATATGCTCATAATTACCCCTTGTATCCGAGTTTCCTAAGTCCGTCTTCGGTTAGAA
CTCGAAATTTTATATTTCTCTTTTCAGCAACAGCTGAGGCAGCTTTCCATTTGTCACAGTTCACAGACCA
CACGTAGATCTCATTCATATAACGTTTCTTTGCTGCGGTAGTAAGATTTGCAGGCTTAATAGGTGGTTGA
GTTTCTTTCTTTGGTTTTATTTCTACAAAGAACTCTTGACCTGATGCATCTTTCATCCATATATCCATAA
AGTATCGACGTTTTTTACCTTCTGCGTTACAGAAATATGGAATTACTGCTGTTTCGCTGCCCCATGCAAT
AATTTCTGGATTTTTATCTAACCATTCGAAAAAGAATTTTTCCCAGTTTGAACGATACGTTATTTTGGTA
TGGTCTCCACGGTATTTTTTTAAATTTTTTGGGACCCATTTACCAGAGTAGGCCATGTTGTCCTCCTTAT
AAATAGTATTATTATTTATACCAATTTCATATTGGAAGGAGACTATTTTGTTATTTACATTCTTCGACCC
AATAGGATATAGTGCTAAAACCATTAATAAGAATGCACCTACTATTCCTATGACAGACATATTTCGTAAC
TATAAAGAGTACTTTAAACGTGTTGCGACCAACTATAGATTACAAACTTATTATATTAAAGGTTCTCCGC
GTCCTGAAGAACTAGCAAACATAATTTATGGCAACCCTCAATTATACTGGGTCCTTTTGATGTGTAATGA
TAACTATGATCCGTATTATGGTTGGATCACATCTCAGGAAGCAGCGTATCAAGCTTCTATTCAGAAATAT
GCAAATGCCGGCGGAGACCAAATTCTTTATCATATTAACGAAAAACGCGAGAAATTTTATAACTTAGTTT
CATATCCAGATGAGCCATTAGTATGGTATGATAAAGGCGACAAAGCTCGTAAGTATCCGCAATATAAAGG
ACCTTTAGCTGCAGTAGATACTTATGAAGCGGCTGTACTAGATAACGAAAAACTTCGTAAAATAAAAATT
GTTGCAAAGGAAGATATAAACTCGTTTATCACTGATTTGATTCGTGAGATGGAGATTGCATAATGGAAAT
GATTAGTAGTAGCCTTAATTGGTTCGTTGGTGTTGTTGAAGACAGAATGGACCCATTGAAACAAGGGCGT
GTTCGAGTACGAGTCGTAGGCCTGCATCCAGCACAGAGAGCACAAGGTGATGTACAAGGTATTCCTACAG
AAAAACTTCCATGGATGACTGTTATTCAACCTATTACATCTGCATCAATGTCGGGTATTGGTGGTTCTGT
TACAGGCCCTGTTGAAGGAACTCGAGTATATGGTCATTTCTTAGACAAATGGAAAACAAACGGTATTGTA
CTCGGTACATATGGTGGAATTGTACGCGAAAAGCCTAATAGACTCGAAGGTTTTTCCGACCCGACAGGTC
AGTATCCGCGACGTTTAGGTAATGATACGAACGTATTAAACCAAGGTGGTGAAGCTGGCTATTATTCGAA
CTCTAACGTAATTCAAGATAACAACTTAGATTATGGTATAAACCCAGATGATACAGATTTAGCAAATATT
CCTGAAGATGATGACCCTAATTTTACAATAACAGAAATGTTACGTCGTGACGAAGGTCTTCGCGATAAAG
TATATTGGGACCATCTAGGGTATCCTACAGTAGGTATTGGACACCTTATCGTAATGGAAAAGACCCGAGA
CATGTCTCGAATTAATAAATTGTTATCCGATCAAGTAGGGCGTGAAGTAACAGGAAATCCCGGGACTATT
ACATTAGAAGAAGCAACAGCTCTATTTGAGAAGGACCTTGCTAAGATGCAGAAAGACATTCGTTCTAATT
CTAAAGTAGGTCCTGTTTATGCTAAAATGAACAGGTCTCGCCAAATGGCATTAGAAAACATGTGCTTCCA
AATGGGCGTTGGCGGTGTAGCAAAATTCAATACTATGCTTAAAGCAATGGCCACAGGCGATTGGAAAACT
GCATACAAATCTGGACGCGATTCGTTATGGTTCCAACAGACTAAAGGGCGTGCTTCACGTGTAACAACAA
TTATTTTAACTGGTAACATGGAATCATATGGCGTTCCTGTTAAAACACCACCTTCACCAGGAGTCGGTGC
CGATTTAGTTACTAGAAATACCGATCCAGAAGACCCGGCTGGTCCTCCTGTTCCATTAGATTCACGTATC
CTTTTTAAAGAACCGGAATCAAGTTATCGTGGTGAATACCCATATGTTCATGCTATGGAAACAGAAAGCG
GTCATATCCAAGAGTTTGACGACACTCCAGGTAACGAACGTTATCGCTTAGTTCATCCAACAGGGTCATA
TGAGGAAGTTTCTCCGTCTGGTCGTCGCACTCGTAAAACTGTAGAAGACCTTTTTGACATCACTAATGGC
GATGGGAATTTCCTGGTTTCTGGTGATAAACTTGTTAACGTTGGTGCTAACGAAATATATTATAACATGG
CGGACCGCCTCCATCAAATAGATGGCAGCGACACAATCTTTATTCGTGGCAACCAAGTTAAAACTGTTGA
AGGTGATGGAACTCTTTACGTTAAGGGCAATATCAAAATAGTCGTTGACGGGAATGCAGATATTCTTGTT
AAAGGTGATGCTAAGTCTCAAGTTGAAGGGAATCATGACTATACTGTCAATGGTAATGTTAAATGGACTG
TCAATGGTAATGTTGATATGACTGTTGCTGGCAATTGGTCGGAGACAATGACTACAATGAGCTCAATAGC
TTCAGGACAATATACTGTTGACGGATCTCGTATTGATATTGGGTAATATATGGCACAAATACTTCCTTTA
AATACCGACTTAGGAGAAGACATGGAAGGGGCGTCTATTGACGTCCTTTTTACTCCACAGTTAGAAACTA
CCGAAACTTTGGTGTCAATAAATATAATAGATTATGAACCAACACAAGGCATTACAGTTGACGGTAATCA
CTTATATGGAACATATGAAAGCGTATTTAGCTTTTCTTCAGATGCATTGAAATATCGATTAAACGATGAT
TTTAAAACTGCATCTTCATGGGAAGATTTACCGCAAGACCAAAGCACTCAACTATATTTGTGGAGAGCTC
CTCAGAACCTCCGTAAAGTATTTAGTTATACGGTTGAAATGATTTATAACTACCAAGAAGAAGGTTCATC
AGGCGGCTCAAGAAGTGACTCTAGTACAGAACCTCCGCCGGCTCCGGTACAAAAAACTCTTACTAAGGTT
TATACAAAAACTATAGTAGGAAATTGGAGCAAATGGGCTCAACAATTACGAAACTATGTTTATGCGAGGC
CATAAAAATGTCTGGCTTAAGTTACGACCAGTGCGTTACAACAGGTCATGAAGCATGGCCTCCTACAATA
ATTAATGCTTCTCAATCTAAAGTATTCACCGGCGGTATTCCTGTTCTTGTAGCAGGAGACCAAATAACAC
CTCATACAGAAATTAAAAAACCGTACGAGACTCATGGAGGTGTTACTGAACCTCGTACATCTAAAGTATA
TGTCACAGGTAAAAAGGCCGTTCAAATGGCTGACCCAATTTCATGCGGGGATACTGTTTCTCAGGCCTCG
TCAAAAGTCTTTATAAAATAGGAATTAAAATGGCAAACACTCCTGTAAATTATCAGTTAGTCAGAACGGC
GAATGCTATTCCCGAAATTTTTATCGGGGGCACATTTGCCGAAATTAAAACAAATATAATAGAATGGCTC
AATGGACAGAACGAATTTCTTGATTATGATTTTGAAGGTTCGCGTTTAAACGTATTGTGTGACCTTTTAG
CATATAATACTCTTTATATCCAACAGTTCAGTAATAGTGCAGTGTATGAAAGCTTTATGCGTACTGCTAA
CTTGCGCAGTTCCGTTGTACAAGCGGCTCAGGATAATGGATATCTGCCTGCATCTAAATCAGCAGCACAA
ACAGAAATTATGCTCACATGTACGGATGCATTAAATAGAAACTATATCACTATTCCACGTGGTACTCGTT
TCCTGGCGTATGCTAAAGGTACTTCTGTAAATCCATATAACTTTGTTTCCACCGAAGACGTCATTGTAGT
TAAAGACAAAAATAATCAATATTTCCCACGTCTTAGGTTAGCTCAGGGACGTATTGTTCGTACTGAATTA
ACATTTGATAAATTAAAACCTATCATTATTCGTGATAAGAACATCGACCGTAATTTGGTTAAATTGTATG
TTGACGGAGCAGAATGGATTAACTGGACTCGCAAATCGATGGTTCATGCTGGTTCTACTTCGACCATTTA
TTATATGCGAGAAACTGTTGACGGGAACACTGAATTTTATTTTGGTGAAGGTGAAATCTCTATTAGCACA
TCAGAAGGTGCTTTAACATCCAACTACATTGGTGGCCTTAAACCTGTCCAGGGTTCTAAAATCGTAATTG
AATATATTTCTACTAATGGTGCTGAAGCAAATGGTGCAGTAGGATTCTCTTATGCTGATACATTAGCTAA
TATCACAGTTATTGGAATTAATGAAAACCCAAGTAATAACCCTGACTTCGTTGGTGCGGATGGCGGTGGC
GACCCTGAAGATATTGAACGTATCCGTGAATTAGGTACAATTAAACGTGAAACTCAACAACGATGTGTGA
CTGCGACAGATTACGACACATTCGTCTCTGAACGATTTGGTTCTATTATTCAAGCGGTTCAGACATTTAC
GGATTCATCTAAGCCTGGGTACGCATTTATTGCTGCTAAACCTAAGTCTGGGTTATATTTGACTTCCGTC
CAACGAGATGATATTAAAAATTATCTTAATGAGTATAACTTAGGGACGATAACTCCTGTTGTTATTTCTC
CTGATTATTTGTTTATTAAAATGAATATTCGCGTTACGTATGCATTGAACAAATTACAAGAATCTGAACA
ATGGTTAGAAGGCCAAATTATTAATAAAATCGACCGGTATTATATTGAAGACGTGGAAATTTTTAACTCG
TCATTCGCAAAATCTAAAATGCTAACGTATGTCGATGACGCAGATATTTCTATCATTGGTTCGTCTGCGA
CTATTCAAATGGTTCGCGAGGTACAGAACTTCTACAAAACACCTGAAACAGGTATTAAATACAATAACCA
GATTAAAGATAGAACATTAGAATCTAACGTGTTTTCATTTGATAGTTTACGCGTTGACCCTGAAACGGAA
GCTACTATTAAATATGACGTTCGCATTGTAGGTTCAGATAGAAATGACCGTGGCATTGGACAAGTTATCA
TTGGTCCGTTTGCAGATGGCGACGTTATAGAAAATGCTTATATTCAACCATATACTGGTGACGATTTTAA
TAAACTTCATGTTACGGACGGAAGAAACAAATATTACTCTATAGGTGAAGTAAATTATCCGGCTGATTCA
ATTTATTGGAATATAGCTAAAATTGATTTAACTTCTGATAGGTTTGAAGTTCAAACTATTGAACTCTATT
CAGACCCAGCTGATGATGTTATCTTTACTAAAGACGGGTCATTAATTGTATTTGAAAATGACTTACGTCC
GCAATATTTAACCATAGATTTGGAGCCTATTTCACAATGACAGTAAAAGCGCCAGCAGTCACGAGTCTCA
GATTATCTAAATTGTCCGCAAACCAAGTTCAAATTCGCTGGGATGAGGTTGGCGCTAATTTCTACTATTT
TGTGGAAATAGCTGAGACCAAAACAGCTAATGGGGAAGCAATTCCCCGTAATAGCTATAGATGGACTAAT
TTAGGATATACCGCTGATAACAATTTCTTTGAGTCTGGTTTAAATTCATTAACAACATATATGATGCGTG
TGGCTACAGCAGCGGAGGGATTTGAGCAGTCTGATTGGAGATACACCGAAGAGTTTGAAACATTTGAAAT
AAACGCTTACACATTCCAACATATGATTGAAATGCAATTAGCTAACGAGTTTATTTCTGAAAAATTTACA
AAAAATAATACAAACTACGTTGATTTTAATAATGACACGATCATGGCAGCACTGATGAGCGAGTCGTTCC
AATTTAGTCCTGCATACACCGATGTGTCATCGATTAGAAATTTTATAATTGGTGAAAATCAGTATCATGA
AATCCAGGGGCATATCCAGGACGTATGTAAAGATATAAATCGAGTATATCTAATGGAATCTGAAGGAATT
CTTTACCTTTTTGAAAGATTCCAACCTATTGTAAAAGTGTCTAATGATAAAGGCCAAACATGGAAAGCGG
TTAAATTGCTTAATGACCGTGTAGGATATCCACTTTCACGAACTGTATATTACCAATCAGAATATACGAC
GTATTTGCTCGGCTATGATAAGATTTTTTACGGGCGTAAATCATCCGATATTCGTTGGTCTGCTGATGAT
GTTCGTTTCAGTTCACAAGATGTAACATTTGCTAAAATCGGGGACCGATTAAATTTAGGTTTTGATGTAG
AGATTTTCGGTACATACGCGTCATTACCAGGAAACGTATCACGTATTGCAGAAGCTATTACTTGTAATGA
TGACTATGTTTATATTGCGGCCAGAGATAAAGTTCGCTTCGTTAAAACCAGTAACGCTCCTATTGATTCA
GATCCATTATCTCCGACCTATTCCGAACGGTTGTTTGAACCTGAGACGTTTACAATAACAGGCAACCCTA
AAGCAGTTTGTTATAAAATGGATTCTGTTGGTGGAAGAATATTCGCTCTTATTATTGGTGAAGTCGAAAA
CGTTAATGACGACCCAAGAACAAAGCCTATTTTAGATTCCGTTGATAAAGGTGTATACGTTTTAGACCAT
GACGCTGGAACATTTAAAAGGATATTTGGTAATACCGAAGAAGAACGCCGTCGTATAGAACCGGCTTTCA
CCAATATGTCTACTGATGGTGTTGAGCTTTATATCTCTTCTAGTAATTTTAAATTTTTAGAATCTGATAT
TGTTGACGACCCAGAAACGCAATCTAAGTATGGACTTTTAGGAGCAGTTAAGTATGAATATCCTAGAGAA
TGGCTCGCAGATAAACATTACCATATGATGATTTTCGCATCAAACGAAGAAAGTAATTGGGAAACTTTTT
CACCAACTCCTATGCAGTATTATGCAGAACCTTTCTTTAGTTATTCTAGAAAATCAGGCACACGTTCTTG
GATTAATAACTCTGATAGAGCGGTAGTGATTTATTCTGATTTGCTTTACACAAAGGTAGTGGAAAGCCAC
CCTAGCACTTCACCTGATCGTAAAGTTCATGAATACTGGAATGATGGTGATTGTAAGATTGTTATGCCGA
ATATAGAATTCACTGGATTTAAAAAATACGCATCTGGTATGTTGTTTTATAAATCATCAGGTGAAATAAT
TTCATATTACGATTTTAGTTATCGTGTTAGAGATAACGTTTCTATAATTTGGAAGCCCACTAACGTATTT
TTGACCTCCTCATTACAAAACCAAGAAAAAGAAACTTCTTGGGTTCCTGTTGAAGAGACAGGTCTAGCTG
ACCCGGATTTACGCCCATTACTCACTACAATGATGCCAGAGTCTTATCTGTTGGATAATACAAACTTTGA
AGCATTTTGTGAAGCGTACATTCAATATCTTTCTGATGGATACGGGACTCATTATAATAACTTATTGAAT
TTGATTAAAAATAAATACCCACGAGAAGAACACGCATGGGAATATCTTTGGTCTGAAATTTATAAACGGA
ACATTTATTTGAATGCTGAGAAACGTGATTTAGTTTCTAGGTTCTTTGAGTCCAGAAGTTACGATTTTTA
TTCTACTAAAGGAACTGAAGCGTCGTATAAGTTTTTGTTTAAAGTTCTTTATAACGAAGACGTTGAAGTG
GAAATTGAGTCATCTGCTGGAACAGAGTACGATATCATAATTCAATCCGATTCTATAAGTGAAGATTTGG
TTGGACAAACTATATACACTGCTACAGGTAGATGTAATGTTACATATTTAGAAAGAAGCTATTCTAAAGG
TAAATTACAATGGACTGTGACTATTCATAACCTTTTAGGTAGGCTTTTAGTCGGTCAAGAAGTAAAAGCC
GAAAGACTAGCAGATTTTGAAGGTGAAATAGTTCGCGGTATTAAAGGTAAAGAACTTGCCCAAAACACTA
TCGATTATTTTAATCGTGGTAGAGCTTATTACGTCATGAAAATAAAGTCAAATCTTCCGTCCTCTCGTTG
GAAATCTGACGTACTACGTTTTGTACATCCGGTAGGATTTGGATTTATTGCAATAACCTTATTAACAATG
TTTATTAATACAGGATTAACGCTTAAACATGTTGAAACTATTATTAATAAATATAAAAATTATAAGTGGG
ATTCCGGACTGCCTACGGAATATGCAGACCGCGTCGCTCGTTTAGACCCTCAAGGTAATGTAGAATTCAA
TCCTGCTACAGGTGAAGTAATTTATGATGCCGGTCCTTATGCTGGTATCGAATACCCTTTACCTGCAAAT
TATAACGAAGAAAATGATAACTCTATTTTCCAAGGACAATTACCGTCCGAACGACGCAAGCCAATGAGCC
CATTATTTGATGCATCAGGTACAACGTTCTCTAGATTTAGAGAGCTTGTTAATGAAAGATTGTTAGATAA
CGTGGGAAATCCTAGAGACCCGATTAATCCACCACAGGTTAAATTAGATGAATGATTCAAGTGTTGTCTA
TCGTTCGATAGTTACTTCAAAATTTAGAACTGAAAAAATGTTGAATTTCTACAATTCAATAGGTGATGGT
GATAATAAAAACACCATCTTTATAACGTTTGGTCGGTCTGAACCATGGGCTGCTAATGAAAATGAGGTGG
GCTTCGCCCCACCGTATCCAACAGACTCGGTTTTAGGTGTAACAGATATGTGGACTAACATGATGGGTTT
AGTTAAAGTTATCCCATCTATGTTAGACTCGGTTATTCCTAGACGTGACTGGGGAGATATTCGTTATCCG
GACCCTTATACATTCAAAATAAATGATATAGTCGTATGTAATACAGCCCCATATAATGCCACTGAAGTCG
GAGCTGGATGGTTAGTATACCGTTGCGTAGATGTTCCTGATGTTGGGATGTGTTCTATTGAGTCTCTCGA
CAACAAAGAAGAATGTCTTAAATTAGGCGGTAAATGGACTCCATCTGTTAGGTCTTTAACCCCTCCTGAA
GGCCGTGGAGATGCTGAAGGGATTATCGAAGTTGGTGATGGATATATATGGGAGTATCTTTATGAGATTC
CACCTGATGTGTCTATAAACCGATGTACTAATGAATATATAGTCGTTCCATGGCCGGAAGAAGTTAAAGA
AGACCCTGCTCGTTGGGGATATGAAAACAATCTAACCTGGCAACAAGATGATTTTGGCCTTGTGTATAGA
GTTAAAGCAAACATAATTCGTTTTAAAGCCTATTTAGACTCAGTTTATTTCCCTAATGCAGCACTGCCTG
GTAATAAAGGATTTAGACAAATTTCTATTATCACAAACCCCTTGGAAGCTAAACTCCGTCCTAATGACCC
TAATATAAAGGCTGAAAAGGATTATTATGACCCCAGAGATTTACAGCGTCATTCTGGTGAAATGATTTAT
ATGGAAAACCGTCCACCTATTATTATGGCAATGGACCAAACCGAAGAGATCAATATTTTGTTTATGTTCT
AATTTAGGGAGACTTCGGTCTCCCTTTCGTGTATAAATAGTATAAACTATTAAGGATTAGCCACATGTAT
ATTCAAACTCCAAAACAATTGATTGACGTTGGCGAAATTGGTAACGCTTCTACAGGCGATATCCTTTTTG
ACGGCGGTGTTAAAATAAACAATGATATAAATGCTATTTACAATGCGTTTGGTGACCAACGAAAAATGGC
AACTGCTAATGGGACAGGACCAAATGGACAAATAATCCATGCCACTGGATACTACCAAAAAGGAGGCCCT
ACTGATTATTTCACCCCTGTTCCAGTAGGAAGTAGACACGACATAGATGCTTCTACCGGTGGTGTTATTG
TTACTGTTGCTAGAGGTGAACTCGGCGATTCCGTGGAATTTATAAATTCAAACGGGTCAATTTCGGTAAA
CAACCCATTAAGTATCCAAGCATTAGATTCTATTAAAGGTGTTGCAGGTAATTTAGTTATAACCACACCT
TATACTAAAGTTACTCTTCGTTGTATTTCTTCTGGTGCAGGTGGTTCAATATGGGATTATTCTACAGAAA
GTATGTTTAGTCATACCGAAATTCCTGTAGACGGGACATGGAATATTATTTCAGACTATGTCAATATTCC
TCTATTTTATAAAACTGAATATAATGCTGCTAAACTTTTGGTTACATGCCAATCTGCCAACGGCAGAAAA
ATTAAATCATGCGAAATAAATATTCTAATAGATACAATTAATTCAAGAGTTATTTCAACCGAATACGCAG
TGATGCGCGTTGGTAATGATAACGAAGAAGATGAAATTGCGAATATTAGTTTTTCGATAATTAACAATTT
TGCCACTATGACAGTTTCTTCACATATAAATGGTCTTCGAGTGGCAGCTAAAGTTATTTCAACTCAGAAA
ATTAGGGTCGCTCAATAATGAAACAAAATATTAAAATTGGGAACGTCGTTGATGACGGACAAGGCGATTA
CCTTCGTCGTGGTGGTGCAAAAATTAATGAAAACTTTGATGAGTTGTATTATGAATTAGGCGATGGCGAA
GTTCCATATTCCGCTGGTGCCTGGAAAACATACCATTCTTCAGATGGACTTAATTTAGCTGCTGAATGGG
GTAAATCATACGCAATTGATACTTCAACAGGGCGTGTTTCTATAAATTTACCTAAAGGAACAGTGGAAGA
TTATAATAAAGTAATTAGAGCCCGTGATGTATTCGCCACATGGAATATTAACCCTGTAACATTAATTGCT
GCCAGTGGTGATACTATTAAAGGTTCTTCTAGCCCAGTAGAAATCAATGTGCAGTTTTCAGACTTAGAAT
TAGTTTACTGTTCTCCTGGGCGCTGGGAATACGTTAAAAATAAACAAATAGACAAAATTACTAGTTCTGA
TATTAGTAGTGTAGCTCGTAAAGAATTTTTAGTCGAAGTTCAAGGTCAAACTGATTTTCTTGATGTATTT
GGGTCTGTTTCTTATAATGTGAATAATATCCGTGTAAAACATCGTGGTAACGAATTATACTACGGTGATG
CGTTCAGTGACAATAGTGACTTTGGTTCTCCAGGAGCTAATCCTGGAGAAATCGTTGCATTAGATGGTAA
AAACATCCGTTTAAGACAACCATGTAATATTGGCGACACCGTACAAATTGAAACCTTTTTGGATGGGATT
ACACAATTACGCAGTTCTTATTCTCGCCGCCAAATACGTATTTTAGATTCGAAATTAACAACCCGTCCTT
CCTTAGAAGGAAGTGTATATGTCGCTGATTTGTCAACTTTGAAATCTATTCCTTTTTCGGCATTTGGAGT
TAATCCTTCAGAACCGGTCAATACTAATTCTTTAGAAGTTCGTTTTAATGGTATTCTTCAAGAATTAGCC
GGTACTGTTGGTTTACCTATGTTCAGATGTGAAGGTGCTGATGCAGAAACTTCTACCGAGTGTTCAGCTT
TAGGTGGGACTTGGGTTACATCTAACACCGATTATTCTATTGAATATGATGATAACGATGCAACTATTGC
ACGTGCTTTAGTCTTTGACCGTAAGTTTGAAGACCAAGACATTATTGATATTACATGGTTTAATAACGAT
TTAGGCGCTTTATTAAGTATCGATGACATTTTAGATACAACTGATGAAAGGTATGTCGCACAAGGTGCAA
CCGTAAATGTGACCGGCGATGTGGCTTTGACCGATTTCAATAATATCGGATGGCCTAATGTAGAATCTGT
TCCGGCATATAGCAGGGAATTCTCATCTATTGCAAATATTTTTAACACTATTTACCCTGTCGGTACTATT
TACGAAAATGCAGTGAACCCTAATAACCCAGCCACGTATTTAGGATTTGGTTCTTGGAAATTATGGGGAC
AAGGAAAAGTATTAGTTGGATGGAACGACGATATTAGCGATCCTAATTTTGCATTAAATAATAACGACCT
TGATTCTAGCGGGAATCCTACACATACCGCCGGTGGAACAGTCGGAACAACGTCTAACACACTAACTAAT
TCTGATTTACCTCCTACTCAAACTGACGAGAAAGTTCTTATTTCCGATGAGAACGGTACAATTATTATTG
GTGGTTGTCAATACGACCCTGATGCAGAAGGTCCTATATACACCAAATACCGTGAAGGCCACGCCACAAC
GAATAGTACACACGTACCGCCTCAAGCCGTAAATAATATTCAACCGTCAATTACCGTATACCGTTGGGTA
AGGATTGCATAATGACCATACTTAATACTAAAGCGGGAGTAATATCCCGCGAAGCAGATTTTTTAGGATT
TAGAAAAAATCCTACTCAAATTGATATTTTAAACAACCAAGGCGTAGGTTCTGTAACCATTTCTCAATTG
GCAAAAGGATTCTACGATGATAACGTAGAATCTGCAATAAACGATGTTCATAATATTGCTAGAGCAGATG
TAGGAACAGTTACAATTAACACCTCAGGTGTATCTCCTGAAGGAACTTCACAGGTAGATTATTGGTCCTT
TAGTGGAAGTGTAACTGACCCTAGTTTGCCCGATGGAAGCCCTGTTATTGTAAAAGTTTACGGGCTTCCT
GTTAATGCTACTGTAGGTATGACAGCCGACGAATTTGTTGTACAATTACGTACTACTCTCCGGAATGCGA
TTTCCGACCAATTGGCTATTGCAGAGTATAAAGATGACCCTACTGTTGGGACTAAATTACAAATAACATA
TTTAGATAACCAAAGACACGTACTCCCAACGTATTCCTCTTATGGTATCACGGTTTCTCAAGAAATAGTG
TCTCAGGCTAAGTCCGGGTACGGCACTTGGAATTTACTAGGTGCGCAAACCATTACTCTTGACAGCCATA
CTTCACCTACAACCTTTTATTATTTTGTGAGAACCGCATGAGTAACAATACATATCAACACGTTTCGAAC
GAATCAGTATATGTTGAATTTGACCCTACCGGGTCAAATTTTGATAGTTCAATAACCAATGTCCAGGCAG
CCTTAGCCTCAATTAGCGCATATGGTGTTAAAGGTGTTCCGGACGCAAGCGAAGCAGAAAAAGGTGTAAT
TCAATTAGCGACAGAACAAGAAGTTCTTGATGGATTTAATAGTACTAAAGCCGTTACACCCGCCACATTA
AATGCAAGACTTCAGTATCCGAACGCGTCAGAAACACAGTACGGCGTAACTAAATATGCAACACAAGAGG
AGGCCATTGCTGGCACTTTAGACACTGTTTCTATTACTCCGCTTAAATTAAACCAAACTATTGATAACAC
GTTCTCTACTCGTTATTCAACAGAAACAACTAACGGTGTTATTAAAATTGCAACTCAAACCGCTGCACTT
GCCGGGTCTGATGACACCACAGCAATGACTCCGCTTAAAACGCAGCAATTAGCAATAAAATTAATTTCTC
AAATAGCTCCTAATAACGACCCGGCTTCAGAATCTATTACCGGTGTTGTGCGTTTAGCTACTGTGGCTCA
AACACGTCAAGGAACTCTTCGCGAAGGATATGCAATTTCCCCGTATACCTTTATGAATTCTGTTGCAACA
CAAGAATATAAAGGTGTTATACGTCTAGGAACACAAGCGGAAATTAATAGTAATTTGGGAGATGTTGCTG
TAACAGGTGAAACGCTAAATGGTAGAGGAGCTACAGGTTCTATGCGTGGAGTCGTAAAATTAACGACGCA
GGCCGGTGTTGCACCCGAAGGCGATAGCTCTGGAGCATTAGCATGGAACGCAGATGTAATTAATACACGC
GGTGGGCAAACTATTAATGGTTCTTTAAATTTAGATCACCTCACAGCAAATGGAATTTGGTCGCGTGGTG
GAATGTGGAAAAACGGTGACCAGCCAGTTGCAACAGAGAGATATGCATCTGAACGTGTTCCTGTTGGAAC
AATTCAAATGTTCGCAGGTGATAGCGCTCCTCCAGGTTGGGTTTTATGTCATGGTGGGACCATTTCTGGA
GACCAATTTCCGGACTATCGAAATGTGGTTGGAACAAGATTTGGCGGTGATTGGAATAATCCTGGAATTC
CGGATATGCGCGGCCTTTTTGTTAGAGGAGCTGGTACTGGCAGTCATATTTTAAATAATCGTGGCCAAGA
CGGATATGGAAAGGATAGATTAGGTGTAGGATGTGACGGCATGCATGTTGGTGGTGTCCAAGCACAACAA
ATGTCATATCATAAACATGCCGGTGGATGGGGCGAATTTCAACGTCATGAGGCACCGTTCGGAGCATCCG
TATATCAAGGTTATTTGGGTACTAGAAAATACTCTGATTGGGATAACGCATCATATTTCACAAATGACGG
CTTCGAATTAGGTGGTCACCGCGACGCAACAGGCACTCTTAACCGTGAAGGACTTATCGGATATGAGACT
CGTCCATGGAATATATCTTTAAATTATATTATTAAAGTCCATTACTAAGGGTAAAAAATGATCGAATTAA
AAAGTCTACCATATGTTGATGGCCCTCCTGACGAGGGTCAAAAACGTTTAAACTGGATTAAAAATTCAGA
AGAAATAACTGGCGCTGATACGTTATACGGTTCTGAAGGAGTAATGAACCGTCCAATAACAGAAGTTCAA
CGAAATGTAGAAACAATTAACGATAACGTTAAGACTATCGCAGAATCTTTAGATACCGCTAATGCTGATA
TTGTCACAATTAAAAGTATCTTGGATGTTTCTGGTGACGTGGATGCTTTAGCACAAATTGGACATAACAC
TGATGATATTGAAGTATTAAAACACACTGTAAATTCACACGGTGTTGATATTTTAAACACTGAAGAAAAA
CTAGATGATACTATTGCTAATATCGGAGTAGTTAATCCAGAAACAGATTCGGTGTATCGTACGGTGCGTA
ACGACCTTCTTTGGATTAAAACCGAATTAGGGCAATATACTGGACAAGATATTAACGGTGTCCCAACCGA
AGGTAATGAAAGCACCGGGATGAAACGACGTATTATTACTAACAGTTCAGTGTTGGTTGACCAAGGCGTT
CGTTTAACCGAGTTAGAAAATAAATTTGCCGATTCTGATGTTGGGGCTCTGACAACCGAAGTTGAAAACC
TCCGTCAAGAAATAGGTCCTAGACCATCGTTAACAGTACCGGTTTACACTCGTTTATCCGGTATTGATTC
ATCCATTTCTATCCAAACTAGAGATATTGCGGCATTAAAAGATTTTGTTGGATATCCTAATTCAACCGCT
ATTAAAACTCAAGTCGAGGCCAATCGTCTTTCTATATCAACAATAAATTCAGACATTAACTCGCCTGGCG
GTATTAAACCACGTTTGACAACGTTAGAAACTACTATAGGCTCTCCAGATTTACCAACTACTCTTCAGGG
TAAGATCAAATTAAATACCGATTCCATTTCAGGTATTAACACAGTTTTAGGTGTTGATTCTTCTAGTGGT
TTACGTTTTAACGTAGCATGGCTTAATCAGGTGGTTGGCGTTGATTCAAATGGTGGACAACCTGAACCGG
CTGGTTCACTTTTATATAGGACTCGTATTCTTGAAACTGGTGTTACTGACCTAGGCAATAACATTCAAAA
CGTTCAAACCGAATTGGGAACTAATTCGTCCGGTATTAAAGGACAAGTGACTAGTTTAAATAAACTTATA
AGCGGCACTAACCCAAACGGTCAAACCATAGAAGAACGTGGTATATTGCCAACAGTTAAAAACCATGACA
CATCAATTATGGCTTTAACTACGCGTGTTACCACTTTAGAAACCGACCTTGCTGCAGCAGAAGCAGAAAT
TCAGGCCCTTAAAGAGGCTGGATATATCGAAGATGCTCCTTCAGACGGTAAATTCTATGTTCGTAAAGAT
GGTGCTTGGGTTGAACTTCCTACAGCTTAATGAAAAGGGCCTTCGGGCCCTAAAGGATTTATATGTCAGG
TTATAATGCACAAAACCCTAAAGAATTAAAGGATGTAATATTACGTCGTTTAGGCGCTCCTATTGTAAAT
GTTGAATTAACTACAGACCAAATTTATGATTGTATTTCCAGAGCATTAGAACTTTATGGCGAATACCATT
TTGACGGGTTGAATAAAGGTTTCCATGTATTTTTTGTTGATGACGAAGAAAAATACCGTCACGGCGTATT
TGATATGCGTGGTTCTAATGTATTTGCTGTAACAAGAATTATAAGAACAAACGTTGGCTCTATTACTTCA
ATGGACGGTAATGCAACTTATCCTTGGTTCACTGATTTCCTTTTAGGAATGGCCGGTGTTTCTGGTGGTA
TGGGTAGTAATTGTGGTAAATTCTACGGTCCGAACGCTTTTGGTGCCGACCTCGGGTATTATTCTCAATT
AGTATCTTATATGGGTATGCTTCAAGATATGATTGCTCCTCTTCCGGATTTTTGGTTTAACTCTGCAAAC
GAGCAATTAAAAGTAATGGGTAACTTTAGACAGAAAGATGTCATTATTGTTGAATCATACGTTCGTTCTT
ATATTGAGACCCATAAGATGGTAGGAAATACAGTAGGTTATGGGCAGGTCGGTCCTCGTGATTCATGGTC
TATTTCTGAGCGGTACGACAACCCGGACCATAATTTGGTCGGACGACGAGTTGGTGAAGATCCTGCAACT
AAACAAGGCGCATATAACAACCGCTGGGTTAAAGATTATGCGTCTGCATTAGCTAAAGAGCTTAATGGAC
AAATTCTTGCTAAACATCAAGGTATGATGTTACCAGGCGGTGTCACTGTTGATGGTGTTCGATTAATCGA
AGAAGCTCGATTAGAGAAAGAAGCTTTACGAGAAGAGTTATATTTACTAGACCCTCCTGCAGGTATTTTG
GTAGGTTAATATGGCGACTTATGATAAAAATCTTTTCGCCAAACTAGAAAATCGTGGCGGGTATTCTCAG
ACAAATGAGACCGAAATCCTCAATCCATTTGTCAATTTTAATAACTATGAGAATAGTCAGACATTAGCTG
ATGTTCTAGTGGCAGAAAGCATACAAATGCGTGGTATTGAATGTTTTTATGTTCCACGTGAATATGTTGC
TGTGGATCTTATCTTTGGTGAGGACCTTAAAAATAAATTTACTAAAGCATGGAAATTTGCTGCGTATCTG
AACTCTTTTGAAGGTTATGAAGGAGCGAAATCGTTCTTCAGCAACTTCGGAATGCAAGTTCAAGATGAAG
TTACATTATCTATTAACCCAGGTCTTTTCAAACACCAGGTCAACAATCAAGAGCCTAAGGAAGGTGATTT
AATATACTTCCCAATGGACAACAGTTTGTTTGAGATTAACTGGGTTGAACCATACGACCCATTCTATCAA
GTAGGTAAAAATGCGATTCGTAAAATTACTGCAGGCAAGTTTATTTACTCTGGCGAAGAAATCAATCCGG
TGCTTCAGAAAAATGAAGGTATCAATATACCTGAATTTAGTGACTTGGAACTTAACCCTGTTAGAAATCT
TGACGGTATCCATGACATTAATATCGATGAATATTCTGAAGTTGAGCAAATCAATTCAGAGGCAAGTGAA
TACGTTGAACCATATGTAGTAGTTAACAACCGCGGTAGACAAAATTCACCATTTGACGATGGGTTTATGA
ATTAATAAATAAATAAGATAAAGCAAACACCGGTCGAAAGGCCGGTTAGGAGAAATGATGTTTGGTTATT
TTTACAACTCGTCGTTCAGGCGATATATCACAATGATGGGCGATTTGTTTTCAAATATCCAAGTTAACCG
TCAATTGTCTACAGGCAATAAATTAATTAGAGTTCCTATTACGTATGCATCTAAAGAGCACTTTATGATG
AAACTTAATAAATGGACCTCTATAAACTCGCAAGAAGATGTGGCTAAAGTCGAAACTATTCTACCACGTA
TAAATCTCCAAATGGTAGATTTCGTTTATAACCCAACGTTTAAAACGAATATATTGAATAACTCTCTTTT
GAGTAAATCGACTAAGGATATTGTAGACCAATACAACCCATCACCAATTAAAATGATTTTTGAACTGAGC
ATCTTTACTCGTTATGAAGATGATATGTTCCAAATCGTTGAGCAAATTATTCCATATTTTCAGCCGCATT
TTAATACGACTATGATTGAGCAATATGGACAGGATATTCCATTTGAAAGGGATATTAAAGTCGTATGGAT
GGCAGCAGCAATGGATGAACAAATAGACGGTGATAATTTATCTCGTCGACGTTTAGAGTGGTCATTAACA
TTTGAAGTAAATGGATGGATGTATCCTCCGGTAGGCGCAGCTGAAGGCCTTATTAAAACGACTTATCTTG
ATTTTCATGCTAATGAACGAGACCTTCAAACAGCCGCCAGTGTTTTTGAATCAGTTGATACAGAAATTAA
ACCGAGAGACGTTGAAGCACAAGATTGGAATGGTGAAGTTGAACAAACCTATACTCATGATATTCCAATC
CCGACTCCACCAACCCCTCCTGGTCCTAGAAAACAATAAGAGGTAAATATGGAAGGTCTAGATATTAATA
AGCTTTTAGATATCTCTGACCTCCCTGGAATATCTGGGGAGGAAGTAGAGGTATATGCTCCTTTACAATT
GGTGGAAGTTCAAAGTAATCCTCAAAACCGCACCCCGGATTTGGAAGATGACTATAGCGTTGTTCGTAAG
AATATGCACTTCCAACAACAAATGTTAATGGACGCTGCCAAGATTTTTCTTGAGACGGCTAAAAACGCCG
ATTCTCCTCGTCACATGGAAGTATTTGCAACTCTTATGGGGCAAATGACTACGACGAACAAAGAAATACT
GAAGCTTCATAAAGATATGAAAGAAATCACATCTGAACAAGTTGGCACTAAAAGTGCTGCTCCATCTAGT
CAGATGAATATCCAAAATGCTACAGTGTTCATGGGCTCTCCAACAGAATTAATGGAAGAAGTAGGAGATG
CTTACGAGGCTCAAGAAGCTCGTGAGAAGGTGATTAATGGAACAACCAATTAACGCATTGAATGATAATC
ACCCATTGAATGAAGGTGACAAAGTTGTTATTCTACCGCCTCATTTAGCTGAACGTAAAGAAGAAGATGG
TATCCATTGGATTAAATCACAATGGGACGGTAAATGGTACCCAGAAAAATTTAGTGACTATCTACGTATA
AACAAAATAGTTAAAATTCCTAATAACTCAGATAAGCCTGAATTATTTCAAACATACAAAGATAAGAATA
ATAAACGTACACGGTATATGGGTTTACCAAACCTTAAAAGAGCAAATATAAAAACTCAATGGACCTATGA
AATGGTCGCTGAGTGGAAAAAATGCCGCGATGACATTGTATATTTTGCTGAGACATATTGTGCTATTACC
CATATCGACTACGGTACAATTAAAGTACAACTTCGTGACTATCAACGCGATATGCTTAAAATAATGTCTT
CTAAGCGTATGACTGTTTGTAACTTGTCACGCCAGCTAGGCAAAACGACTGTAGTAGCTATTTTTCTTGC
CCATTTTGTTTGCTTTAACAAAGATAAAGCAGTAGGTATTCTTGCACATAAAGGCTCAATGTCGGCGGAA
GTATTAGACCGTACAAAACAAGCAATTGAATTACTCCCTGATTTTTTACAACCAGGTATTGTTGAATGGA
ACAAAGGGTCTATTCAGTTAGACAACGGTTCCTCAATCGGTGCTTACGCTTCATCACCTGATGCGGTTCG
TGGTAACTCGTTCGCTATGATTTATATTGATGAGTGCGCGTTTATCCCAAACTTCATTGATTCATGGCTT
GCTATTCAACCTGTTATTTCTTCAGGTCGTCGTTCAAAAATTATTATTACAACCACACCAAATGGATTAA
ATCACTTTTATGATATTTGGACTGCAGCTGTTGAAGGTAAATCAGGATTTGAACCTTATACTGCAATTTG
GAACTCAGTTAAAGAACGACTATACAACGATGAAGATATTTTTGATGATGGATGGCAGTGGTCTAAACAG
ACTATTTCAGCCTCTTCATTAACACAGTTCCGTCAGGAACACACGGCGGCTTTCGAAGGGACATCAGGCA
CACTTATTTCCGGTATGAAATTAGCTATATTAGATTATATTGAAGTTACACCTGATAGCCATGGATTTCA
CCAGTTCAAAAAGCCTGAGGAAGGTCATAAATATATTGCGACGTTAGACTGTTCTGAAGGACGTGGACAG
GATTATCATGCAATGCATATTATTGATGTTACGACAGATAAATGGGAACAAGTTGGTGTTCTACACTCTA
ATACTATTTCACACCTTATACTCCCAGATATTGTGTTTAAATATCTAATGGAATATAACGAATGTCCAAT
TTATATTGAATTGAACTCAACAGGTGTTTCTGTCGCTAAATCGCTTTATATGGACCTTGAATATGAAAAC
GTTATTTGCGATTCAATGAATGATTTAGGCATGAAGCAAAGCCGTAGAACTAAGCCTGTAGGTTGCTCTA
CATTAAAGGACCTTATTGAAAAAGACAAACTCAAAATAAACCATAGGGCTACTATTCAAGAATTCAGAAC
GTTTAGTGAAAAGGGTGTATCTTGGGCTGCTGAAGAAGGTTACCACGATGACTTAGTGATGGGTCTTGTT
ATTTTCGGATGGTTGTCAACGCAGCAGAAATTTGCAGACTATGCGGATAAAGATGACATGCGCCTTGCAT
CAGAAGTATTCTCAAGAGAATTACAGGATATGAATGACGACTACGCCCCGGTTATATTTGTTGATTGTGC
AAGTAATTCGGCAGAATATAATCCATCAGCACATGGCCTGTCAATGGTATAAATAAAATAAAGCAAATTA
AGAGGAATTAAAATGGCACTTCTCTCTCCGGGCGTTGAGCTCAAAGAAACTACCGTACAGAGTACGGTAG
TTAATAACTCCACTGGTACTGCTGCCCTGGCTGGAAAATTCCAATGGGGACCTGCATTCCAGATTAAACA
AATCACCGATGAAGTTGCGTTGGTTGATATGTTTGGTACTCCTAACACAGACACCGCAGATTATTTCATG
TCTGCTATGAACTTCCTTCAATATGGTAATGACCTTCGTGTTGTACGCGCTGTTGATCGTGATACTGCTA
AGAACTCATCTCCTGTGGCAGGAAACATTAATTTTACTATTTCTTCGGCTGGCACCAACTACAGAGTTGG
TGATAAAGTTGTAGTTAAATATTCTACAGATATTATCGAACCAGACGGTGAAGTTACTTCAGTTGATTCT
GACGGTAAAATTTTGAATATCTTTATTCCTTCAGGTAAAATTATCGCTAAAGCTAAAGAAATCGGCGAAT
ATCCTGAATTAGGTTCAAACTGGACTGCCGAAATGTCTGGGTCTTCTTCTGGTCTGTCTGCAGTAATTAC
TATTGATTCCGTTGTAATGGATTCTGGTATTCTGTTGACTGAAGTTGAAACTTCAGAAGAAGCTATTACT
TCTCTAACTTTCCAAGAATCTATTAAAAAATATGGTGTCCCGGGTGTAGTTGCTCTTTATCCAGGTGAAC
TTGGAGACCAGCTCGAAATTGAAATCGTATCTAAAGCAGACTATGACAAAGGTGCTTCAGCCCAGTTAAA
AATTTATCCTGATGGTGGCACTCGTTATTCTACTGCTAAAGCAATCTTTGGGTACGGTCCGCAGACTGAT
GACCAATATGCAATTATCGTTCGTCGCAACGACTCGGTAGTCCAGAGCGTAGTTCTTTCTACTAAACGTG
GTGAACGAGATATTTATGGTAGCAATATCTTCATTGATGATTTCTTTGCTAAAGGCGCAAGCAATTATAT
TTTCGCTACGGCACAAGGTTGGCCAAAAGGTTTCTCTGGCGTAATCAAACTGAATGGTGGCTTATCATCT
AATGAAACGGTTGAAGCCGGTGATTTAATGGAAGCTTGGGATTTGTTTGCTGACCGTGAATCGGTTAATG
CACAGTTGTTTATTGCTGGTTCTTGTGCTGGTGAATCTTTAGAAGTTGCTTCTACAGTTCAGAAACATGT
TGTAGCAATTGGTGATTCTCGTCAAGATTGCTTGGTTCTTTGCTCGCCTCCACGTGCAGCTGTAGTTGGT
ATTCCTGTTAATCGTGCAGTTGATAATCTGGTTGATTGGCGTACAGCGTCAGGAACTTACACTGATAATA
ACTTTAATATAAGTTCTACTTATGCTGCTATTGATGGTAACTATAAATATCAATATGACAAATATAACGA
TGTGAATCGTTGGGTTCCATTAGCTGCTGATATCGCCGGTCTTTGTGCTCGAACAGACAATATTTCTCAG
CCTTGGATGTCTCCAGCCGGTTATAACCGTGGTCAAATTCTTAACGTTATTAAGCTTGCAATTGAAACTC
GTCAAGCACAAAGAGATCGTTTGTATCAGGAAGCTATTAACCCTGTTACTGGTACCGGTGGTGATGGATA
TGTTCTGTATGGTGATAAAACTGCCACTTCTGTTCCTTCGCCATTTGACCGTATTAACGTACGTCGTTTG
TTTAACATGGTTAAAACGAACATTGGTTCGGCATCCAAATATCGCCTATTTGAATTGAACAACGCATTTA
CCCGTTCTTCTTTCCGTACAGAGACTTCTCAATATCTACAGGGTATTAAAGCTCTTGGTGGTGTATATAA
CTTTAAAGTTGTTTGTGATACTACCAATAACACCCCAGCAGTTATCGACCGTAATGAATTTGTAGCTACT
TTCTACTTACAACCTGCCCGCTCGATAAATTATATTACGTTGAACTTTGTAGCAACAGCAACTGGCGCTG
ATTTCGACGAACTGATTGGTGCTGTAGGTGGCTAATAAGACGCCTGATGGGCTATTTCGGTAGCCCATAT
AAATATACTATATCGTTTAAAAATTAATTCTATGGGCATCCGGTTAATCCTAAGCCCATATTACTACAGA
GGCTAATATGTTTGTAGATGACGTAACTCGTGCCTTCGAATCTGGTGATTTCGCTCGCCCTAACCTGTTC
GAAGTAGAAATCTCTTATCTTGGGCAAAACTTTAGCTTCCAGTGTCGTGCTACTGCTCTTCCTGCTGCGA
TCGTTGAAAAGGTTCCTGTTTCTTATATGAACCGTAAAATTAACGTGGCCGGTGACCGTACATTCGATGA
TTGGACTATTACAGTAATGAACGACGATGCTCATAGTATTCGTCAGAAATTCGTTGATTGGCAAGGTATT
GCAGCAGGACAAGGTAATGAAATTACCGGTGGTAAACCTGCTGAATATAAAAAGTCTGCTATCGTTCGTC
AATTTGCTCGTGATGCTAAAACTGTCACTAAAGAAGTTGAAATTGTTGGCTTGTGGCCTACTAACGTTGG
CGAAGTATCTCTTGACTGGGACAGCAATAACGAGATTGAAACGTTCGAAGTAACTCTTGCTCTTGATTGG
TGGGAATAATCTGGTTGGGGAGAAATCCCCAGCTTCCCGTGATGACGGAGAAGTCCATATAAATATAACT
ATAATTCCCATTTGGAGAATACAATGAAATTTAATATCTTAAGTTTGTTTGCTCCATGGGCAAAAATGGA
CGAACGTGATTACAAAGACCAAGAAAAAGAAAATTTAGAATCGATCACCTCACCAAAATTAGACGACGGC
GCTAAAGAATACGAAGTATCTGAAAATGAAGCACAGCAAACATATAATGCTATGTTTCAGAGAATGTTCG
GTAGCCAAGAACCAGGGCTCAAATCAACGCGTGAATTAATCGATACGTATCGAAATTTGATGACGAACTA
TGAAGTGGATAATGCAGTCTCTGAAATAGTTTCCGATGCTATCGTATATGAAGATGATACAGAAGTCGTT
TCTATAAATTTAGACAACACAAAATTTAGTCCAAATATCAAATCAATGATGTTGGATGAATTTAACGAAG
TGTTAAATCATTTATCTTTCCAACGTAAAGGTTCAGATCATTTTAGACGTTGGTATGTGGATTCTCGAAT
TTTCTTCCATAAAATTATTGACCCTAAACGCCCTAAAGAAGGTATTAAAGAGCTTCGTCGTTTAGACCCA
CGTCAAGTTCAATATGTCCGTGAAGTTATTACAACCACTGAAGCCGGTGTTAAAATAGTCAAGGGTTATA
AAGAATATTTCATTTATGACACATCACACGAATCTTATGCTTGTGATGGTCGCATATATGAAGCTGGCAC
AAAAATAAAAATCCCTAAAGCCGCGATTGTTTATGCCCATTCTGGTTTAGTTGATTGTTGTGGTAAAAAT
ATCATTGGTTATTTGCATCGGGCTATTAAGCCGGCGAACCAATTAAAACTTCTTGAAGATGCCGTCGTAA
TTTATCGTATTACTCGTGCTCCTGATCGTCGTGTATGGTATGTTGATACAGGTAATATGCCTTCAAGAAA
AGCAGCAGAACATATGCAACATGTTATGAATACGATGAAAAACCGTATTGCATATGATGCTACCACAGGC
AAGATTAAAAACCAACAGCATATTATGTCGATGACCGAAGATTATTGGTTACAACGACGTGATGGTAAAG
CAGTAACAGAAGTTGATACATTACCAGGTGCAGATAATACTGGAAATATGGAAGATGTACGTTGGTTCCG
TAATGCGCTTTATATGGCTTTACGTATTCCTATTACCCGTATTCCAAGTGACCAAGGTGGTATACAGTTT
GATGCTGGTACTTCTATTACACGAGATGAATTGTCATTTGGTAAATTTATTCGTGAGCTGCAACATAAAT
TTGAAGAGATATTCCTAGACCCGCTTAAAACTAATTTAATTCTTAAAGGAATTATTACAGAAGATGAGTG
GAACGATGAAATAAATAATATTAAGATAAAATTTCATCGGGATAGTTATTTCTCGGAATTAAAGGATGCT
GAGATTCTGGAGCGTCGAATTAATATGCTTCAGATGGCCGAACCATTTATTGGTAAATATATTTCTCACA
GAACAGCTATGAAAGATATTCTTCAGATGTCTGACGAGGAAATTGAACAAGAGGCTAAGCAAATTGAAGA
AGAGTCGAAAGAGGCTCGTTTCCAAGACCCCGACCAAGAACAAGAGGATTTTTAATGGACGATTTAATTC
AAGCTATTAAATCAAACGACCTCGTTGCTACTCGAAAGTTTTTTGAAAGTGCAATGGCAGAAAAAACGGT
TCGTTTGATTGAAGCACGCAAAGCAGAAATCGCTTCTCAATTTTTGATTGAAGGCGAAGAACCTGAAGAA
GAAAAGAAAGCTAAAGCTTCGGAAGACGACGCTGATGAAGGCGATGACGACGAAGACGAAGATGATGAGG
ACGATGAATAATGTATCTTATCCCTGAATCTTATGAATTGGTACTCGAAAATGTCGAAGCACTTATTCCT
GAAGCACAGGGCCGAATCGATGCATTGTCTTCTGCTCTCGATATTGACGATATAAATACTATTATCGAGA
ACATGCTTGAAACTGAAACGGATTTAGCTGTTGCAATGGCTTCCATTATTAATGAAGAACAGTTAAATGA
GTTTATCGTTAAACATGTTTCTTCTCGTGGTGAAGTCACCCGCACTAAAGACCGTAAAACTCGTGAACGT
AACGCGTTCCAAACAACCGGTCTTTCTAAAGCAAAACGTAGACAAATCGCTCGTAAGGTCGTTAAAGCTA
AAAAAGCTAACCCTTCAGGCCAAGTTAAAGGCTTGCGTAAGCGTAAAAAGGCTCTTAAACGTCGTAAAGC
ATTAGGATTAAGCTAATGAATAAACCCGAGTTACTTATTGAAACTTGGGGTCAACCCGGTGAGATTATTG
ATGGCGTTCCAATGTTGGAATCTCATGATGGAAAAGATTCTGGCTTAAAACCAGGGCTTTATATAGAAGG
TATTTTTCTTCAGGCAGAGGTTGTTAACCGAAATAAACGTTTATATCCTAAACGCGTTTTGGAAAAAGCA
GTAAGTGACTATATTAAAGAACAAGTCGCAACCAAACAAGCCCTTGGAGAATTAAACCATCCACCTCGCG
CAAATGTTGACCCTATGCAAGCCGCTATCATTATTGAAGATATGTGGTGGAAAGGAAACGATGTATATGG
ACGCGCTAGAATTATTGAAGGCGACCATGGTCCCGGCGATAAATTAGCTGCTAATATACGAGCTGGTTGG
ATTCCAGGTGTTTCCTCTCGTGGTCTTGGTTCTTTAACCGACACCAATAAAGGGTACCGTATCGTGAACG
AAGGATTTAAATTAACCGTCGGCGTAGATGCCGTATGGGGACCTTCTGCTCCAGATGCTTGGGTTACTCC
TAAACAAATATCAGAATCAGAAAATTCGGTGGAAATCACCAAAAACAGTGCTGACGAAGCATTTAAAGCT
CTCGCAGAGAGTTTAAAAGCATTATAAATAATAATGTAATCTAAACCACAGGACACTAAAATGATCAAAA
GAACAATTTTGAAAGAAGCTCAGAATATCGAGACTTCAGTTGCTCTTAATAGTGTTTTCGAATCAGTAGA
ACTGTCTCCGGACGTTAAAGCTAATTTCAGCACTGTATTCGAAGCCACCGTTAAGCAGGAAGCAGTCAAA
CTGGCTGAATCTCATATCAAAGCCATCGCCGAAAAAGCCGAAGAAGAAGTTGAAAAGGCTAAAGAAGATG
CTGAAGAGAAAGCTGATAAAAAATTGGCTGAACAAGCTTCTAAATTCCTGGACCATCTTGCAAAAGAATG
GCTCGCAGAAAACCAAATCGCAGTTGATAAAGGCATTAAAGCTGATTTGTTCGAATCCATGCTTGGTGGT
CTGAAAGAACTGTTTGTTGAACATAACGTTGTTGTTCCAGAAGAATCTGTAGATGTTGTAGCAGAAATGG
AAGAAGAGCTGGCCGAACATAAAGAAGAAACCGCTCGTTTGTTCGAAGAAGTTACCAAACGTGATGCATA
TATCAATTACGTTCAGCGTGAAACCGCTATTAATGAAAGCGTGAAAGACCTGACTGAATCTCAGAAAGAA
AAAGTTATTGGCCTGGTTGAAGGTATGGATTATTCTGACGCATTTGGTACTAAGTTAACTGCTATTGTAG
AAATGGTTAAAGGTTCTACTAAAGAAGAAGCCGCTATTACCGAAAGTATAAATACAGTTGACAATGACGC
TGCCGGTCTTAATTTTGTTGCCGAAGCAGTTGACACTACCACAACTCAGGTAGAACAGAATTCTAATGTA
AGTTTATATGCGAAAGTCGCATCTCGTTTCTAATTTAAAGGTTAACACAAATGACTACTATCAAAACTAA
AGCTCAGCTCGTAGACAAATGGAAAGAACTGCTGGAAGGTGAAGGCCTGCCGGAAATCGCTAATAGCAAG
CAGGCTATTATCGCTAAAATCTTCGAAAACCAGGAAAAAGATTTCGAAGTATCCCCTGAATATAAAGACG
AGAAAATCGCTCAGGCATTTGGTTCTTTCTTGACCGAAGCTGAAATTGGTGGTGACCACGGTTATAATGC
TCAGAACATCGCAGCAGGTCAAACCTCTGGTGCAGTAACCCAGATTGGGCCGGCAGTTATGGGTATGGTT
CGTCGTGCTATTCCTAATCTGATCGCTTTTGATATTTGTGGTGTTCAGCCTATGAACAGCCCTACCGGTC
AGGTATTTGCTCTCCGTGCAGTATATGGTAAAGACCCTATCGCTGCTGGCGCTAAAGAAGCTTTCCATCC
GATGTATGCTCCGGATGCAATGTTCTCTGGTCAGGGCGCTGCTAAGAAATTCCCAGCGCTGGCTGCTAGC
ACACAAACTAAAGTAGGTGATATCTATACTCACTTCTTCCAGGAAACTGGTACTGTATATCTGCAAGCTT
CTGCTCAAGTAACAATTAGTTCAAGTGCTGATGATGCAGCTAAATTAGATGCAGAAATTATCAAACAAAT
GGAAGCTGGCGCACTGGTAGAAATCGCTGAAGGTATGGCTACTTCTATCGCTGAACTTCAGGAAGGCTTC
AATGGTTCTACCGACAACCCGTGGAACGAAATGGGCTTCCGTATCGACAAACAAGTTATTGAAGCTAAAT
CTCGTCAGCTGAAAGCAGCTTACTCCATCGAATTGGCACAAGACCTCCGTGCAGTACACGGTATGGATGC
TGATGCTGAACTGAGCGGTATTCTTGCTACTGAAATTATGCTGGAAATCAACCGTGAAGTTGTTGACTGG
ATTAACTACTCCGCTCAGGTTGGTAAATCTGGTATGACTAATATCGTTGGTTCTAAAGCTGGTGTATTTG
ACTTCCAAGACCCGATTGATATTCGTGGTGCTCGTTGGGCCGGTGAAAGCTTTAAAGCTCTGTTGTTCCA
GATTGATAAAGAAGCAGTTGAAATTGCTCGTCAAACCGGTCGTGGTGAAGGCAACTTTATTATCGCTTCC
CGTAACGTAGTTAACGTACTGGCATCAGTCGATACTGGTATTTCTTACGCTGCACAGGGTCTGGCTTCTG
GTTTTAATACCGACACTACTAAGTCTGTATTTGCCGGTGTACTTGGTGGTAAATACCGCGTATACATCGA
CCAGTATGCTAAACAGGATTACTTCACTGTTGGTTATAAAGGCGCTAACGAAATGGATGCAGGTATTTAC
TACGCTCCTTACGTTGCACTTACCCCACTGCGTGGTTCCGATCCTAAGAACTTCCAGCCGGTAATGGGCT
TTAAAACTCGTTATGGTATCGGTGTTAACCCGTTTGCTGAAAGTTCCCTGCAGGCTCCAGGTGCTCGCAT
CCAGTCCGGTATGCCGTCTATCCTGAACAGCCTTGGTAAGAACGCTTACTTCCGCCGTGTATATGTAAAA
GGCATCTAATCTTAATTGATTAAATCTTATTTTGGGAGACTTCGGTCTCCCATTTTTGGTTTTATTTCTG
CGCAATTTCGATGTAAGTTTTCAAAATATTTTGCCAATTAGGCATACCTTCTGAACATATGCCGGAGAAC
CGTCTTTATTTTTGAATGATGCAAGTTTATCAGTGGCCCAATAACCTTTAGTTCGAGCTTCAGAATCAAC
TTTCATCCATACTTTGTTGAAGGCATTACCATTAACTTTTGCACCATATTTTTGTACTTTCGGTTACAGA
TCCAGCTTCCAGAACTTTTACAGTATCTCGTAAGAAACGTGCTTTAGTCATTTTGTTTACTCCTCTGCAG
CTGATAAGTCGATAGTATCACATACCAAATACGTTGTAAACAATCTTTATAAATAATCTATATCACATAA
GGGAAAAATGCAATGAGTAAAATCCAAAAATTATCGCGTGAATCTACAACGTCTACCAGCAACTCAATTG
GTCGCCCAAATCTCGTTGCTTTGACTCGCGCTACGACTAAATTAATATATTCTGACATCGTAGCAACACA
AAGAACTAATCAACCTGTTGCTGCTTTTTATGGTATCAAATATCTTAACCCAGATAACGAATTCACATTT
AAAACTGGTGCTACTTATGCTGGCGAAGCTGGATATGTAGACCGAGAAAAAATTACTGAGCTCACAGAAG
AATCAAAAGCCACACTAAATAAAGGCGATTTTTTCAAATATAATAATATCGTCTATAAAGTGTTAGAAGA
TACACCATTTGCAGATATTCAAGAAAGTGATCTAGAATTAGCTCTTCAGATTGCAGTCGTTCATTTAAAG
GTACGGTTGTTTTCAGATGCAGCGGTAACAAGCAAATTTGAAAGCTCTGGTAGCGAAATTTCTGATGCAA
GATTCCAGATTAATAAATGGCAAACTTCAGTCAAATCTCGTAAACTTAAAACCGGCCTCACGGTTGAATT
AGCGCAAGATTTGGAAGCGAATGGATTTGATGCCCCTAACTTCTTAGAAGATTTGCTTGCAACTGAAATG
GCTGATGAAATTAATAAAGATATTCTTCAGTCTTTAATTACTGTATCGAAACGTTATAAAGTTACTGGAA
TTACTGACACCGGATTTATTGACTTGAGCTATGCATCCGCTCCAGAAGCAGGTCGTTCGTTATATCGAAT
GGTGTGTGAAATGGTATCACACATTCAAAAAGAGTCAACTTATACTGCGACGTTTTGTGTAGCTTCAGCT
CGTGCAGCTGCTATTCTTGCTGCTTCCGGTTGGTTAAAACATAAACCAGAAGATGATAAGTATCTTTCAC
AAAATGCTTACGGGTTCTTAGCTAATGGTTTACCGCTTTATTGCGATACTAACAGTCCATTAGATTATGT
GATCGTTGGCGTAGTAGAAAATATCGGTGAAAAAGAAATTGTTGGATCAATTTTCTATGCTCCGTATACA
GAAGGTCTCGACTTAGATGACCCGGAACATGTTGGTGCATTTAAAGTTGTAGTTGATCCAGAAAGCTTGC
AACCGTCTATTGGTTTATTGGTTAGATACGCTTTATCAGCAAATCCTTACACAGTAGCAAAAGACGAAAA
AGAAGCGAGAATAATTGATGGCGGGGACATGGATAAAATGGCAGGACGTTCAGACTTGTCTGTTTTACTC
GGTGTTAAATTGCCTAAAATTATTATAGATGAATAAACAAAAAAAGGGACCTTACGGTCCCTTTTTTCGT
TATGATACTAATTCAATCCATGCAGGACGCAGAACATCTTGCACCATTCGGACTAATTCTTTCTTAACAA
GATTCGGATTATCAGATGTTGTTAATACAATACCTTCACGAGAAGTTTCTTCCAGAATATCTTGAACAGT
CAATCCCATCACTTTGCCAAAATCTTTTGGCGTTACAGTCCCAATCTTAGAAATAACATTATTAACACGA
TTTAATGTAACATAACAAGCTAGAACATCAAGCAAGTTTTTGTCAATTTCGGTTAATGGAACCTGAGTTT
TAATAGGCTTATCAGACTTTTTCTTTTCACTGAATTTAGAGTTCTTGCACTTAATCGCTACACGAGTACC
GTTTGGCAGCCATTTAGGGAAACAAGGCTTCAGAACATAACCTTCTGCAGTATTATCACCAATAACATTA
GCATCAAATACACAATTATTTGCTTCTACAAGGTCTTCTGACGCAGTAGCATTATAAGCGGCTAAAACGG
AATCAAGGTCATTTGGAATCATGATAAGAGAATCAAATGTTCCACGACCAAGCATTGGTGCCATTTTAAA
ACCGAATTCATTACAGAAATCTTGCATTTCGTAATCGGTCAAATACGTATTATCACCACTTTCTGTATTG
ATAAGGATATCGAACACATAAAAATCTTTTTCACCGTAGTCAACACCTTTCTGGATTCCACCACCAGCGA
ATTCACCGAATACTTGATATGATACGGCTCGAGCTGTGTACATGAATTTCTGAACGGTTTTAATAGCTTT
ATCATACTTCTTGAGTACGATTTCATAACCATAAAAATCTTCTGCTGGAAGAATAGGGCCTGTGCGCTTG
GCGCATGTGACGTTGTCACGTTCAATTATTAACGAGAAGTTGGTCCCATGGATTTTCTCACGTGCTACCC
AAACACCAGTAGTCAAACCATTAGTGTAGAGTTTTTCAATAAACTTAGAGTTGTAGTGGTTTTCAAGACT
GCTGTATTTCTTAAACATAAATCACCATTATAAATAATAATATCAAAATAATTAGCAGAGACTCTATCTC
CGACCCGATGTTTAATTTGAATGGATAGAACCTAGATTCATTATACCATCAAAAAATGTAAAGCATATTA
GAACTTGATTTCTATCCAATGACCATCACGTTGGTCGTGATTAATTTTGTACTGAAAGCCGTTATCACGA
AGCCATTGACCGACTTGTTCAGTTATAGTTAAATCGTTCTTTGACGGGTAGTACGTGAATTGTGTCTGAC
CTTTGTCAGCGGCTTTCTCTGCCATCGCAGAGAAGTTAGTAATAAAATCACTCAACAAATTAGCTTTAGT
GGCCAGAGCCCTTTCTCTTAATTCCTGTGCAAAACTCATTTCTTCACCTTTTTGTTAATCAAACGTTTAC
GGTATACAACTTTTTCTTTTGCTTTAAACTTTGACCGAGCTGTCTCGGCTTTAGTCCATAGTAATCCAAC
TTCTTTAGGTTGTAAACCGATTTTTTGAGCAATTTCTACGAATGAAAATCCCGCCTCATGTAATGTATAA
ACTTCAACTTCAGCTCTCATAATCAATCCCGTATTATTTGGTTTGTGCCATTATATACATCAATCTCACG
TTGTGTTTTGTATGCTTTAAAAACGAAGAAAGGGGCCGAAGCCCCTTACGATTATGGATATGTATAGATG
ATACCAGTTTCCAAAGCAGTTTTATGGATGATGTATCCATTACGTGATTCTTGAACATCAACTTCTGGAT
AGTCTTTCATCATCTTCTGAAGAGTGTAACGATGCAGGTAGTATTTACTATCTGGATCTTCAGTTTTCCA
ATCTTTACCTTCTTCAGTCATTTTTTGGATTTCATCCATAACCCACCAACCGCACCAGATGTAAGCTGAA
GTACGATGTGGAAGAGGATGAACATAAGGTAGTTCACCTTCTGGCTCAATTGGAGTCTGTTCAGTAATAA
CAACTTCAGCGGTTGAACTAATTGTCTTTGAAGTATAGTTATCTTTAGTTAATACTGCTTCAACTTTAAT
TGTATGAGTACCAGCTGAGGAGGTATCAATACTGTAAGTATTAGTAGAATTACTTTCTGCTACATTGTCT
TTCTTCCAAGAATACACAATATTAGTATCACCTGGAGCACCAGTAACAGATGCTGTTAAAGTTGCAGTTC
CGCCAACAGTAGTATTAACTGATGGCGGAGATAAAGAAATGGTGGCACTATTAAATGTAGCATTATTAGT
TACTACTGTTGCTTCTGCTGAAATTTCTTTTGTAACATAATTTGTTGCAGAAACAGATACGGTGCATTTA
AGAGTTTTACTTCCGACCTCGGTTGGAGTGAATTTATACGTAGCAGAAGTTGCATCCAGAATATTACTGT
CATCCATTGACCATTGGAATGATGTAGTAGCACCTGAAGGTGCACCAGAGACATTTGCAGTTAAAGTAAT
AGGAACACCAAAGACCGTAGTCGGAGACTCAGGCGTAATTTTTAGTGTTGAAGAATTAGCCTTTTTATTT
ACAGTCAAAGAAACCGCTGATGATTCTACTGTTTTATCAACGTAATCAGTTGCAGTCACTGTGACAGAAC
AAGTTATAGACTTAGTTCCTTCAGATGTTGGTGTATATTCAAAGGTTGATTGCTTTTGACCATCAACAGC
GACCCCGTCAACTTTCCATGTATAAGCAATAGCAGCACCACTAGGTTGATTGCTTACATTAGCAGTGAAT
GTTGTTGCTGTTCCAATTTCTACTGCCGCCGGAGAAGCCGGAGTAACAGCGACGGTAGAATTATTTTCTT
TCTTATTAACAGTGATAGTTGTTGACGCTTCAGCTATTTCCGGATCTCCTGCGGAAAGTGTATTGGTTGC
AACCACTTTAATTTTTTTTGTTCCTGCCGGAGAAGCAAGAGTATAATCCATTGTAGCAGCCGTAGACTCC
TGTGCTATATCATCTACAGTCCAGACGTATGTAATAGTACCATCTGGAGTTTCACCTGCAGGTGTAGCAG
TGAATGTTTGTGAACCTCCAATAACCCCTGTAGGAGTTAAAGGAGATAACGTGACAGTGAATGCCATAAG
TTATCCTTATTTTAATGTTACGAAAGAAGAATTACGAGTTTCACGAATTAGAACTGATCCATCGCGATTA
ATATAATAAATTAAGCTAAATAATGTTTGGTGAGCAGAAGCATGCACAAAACTCGTTGGGTGAGATTTCC
AATCTGGGGTTTCGGCTATCCATTGATAAATCCACCAAGGAACAGTAACATATCCTGGGCCTTTGCCTAA
TTTAATGAGTGTAGGACTAAAATTTTCAGGCAGAACAAAATTTACTTCTTTATTTACTTCTGGCTCAGGC
TCTTTTTCAGATTCAACAACCTGAGTAATTGCTTCTTCGAATTTATCATGGTCGAATTCTTTTTCTTGTT
CGACAACTTCTAATACTTCAACTTGTTCTGTTGGAGAATCAAACAACAGAATAGCTTCTTCTTTAACTTC
TTCGTTGGTGAAATTAACACCGTCCACATCATCTGCGGCAGTAATTAAATCAGTAATAGATAATCCATCA
GTTTCAGGTAATGGTTCATCAGCCAGTGCGTTAAGAGCTTCTTCGATATCAATAACAATATTATCGAACG
ATTTTGTTTTCTTAACACTAATGCCAAATTGTTCTGCATATTCAAACAGTTTAGCTTTAGCTTCCTTTTT
ATCAGAAAGAGCACGTAACTCTTCAATATAGTCTTTATCGATCATGGTATTTCCTCATTATAAATATAAC
TATATTTATTACATGGTAATTTGACATGACTGACATTAAAGTACATTTTTATGATTTTAGTCACGTGCGC
ATTGAATGCGACGAAAGTACGTTTTACGAACTTCGTGACTTTTTTAGCTTTGAAGCTGACGGGTATAAAT
TTAACCCAAAATATCGCTATGGGCAATGGGATGGTAGAATTCGACTTTTAGATTACAATCGTTTGTTACC
ATATGGACTTGTAGGACAAATAAAAAAGTTCTGTAACAATATGAGTTATTCTGTATGGATTGACCCTAAA
ATCTTTGAGACCGAAGACCTTACCAGGGAAGATTTTGACGCGTGGCTTTCTAAACAAGAAATTTATTCAG
GCAACGCCAAAATCGAACCACATTGGTATCAAAAAGATGCCGTATATGAAGGTCTGGTTAATCGTCGTCG
AATTTTAAACCTTCCGACATCAGCAGGTAAATCACTAATCCAAGCACTTTTAGCTCGATATTATCTAGAG
AACTATGAAGGTAAAATTCTCATTATCGTCCCTACAACAGCATTGACAACCCAAATGGCTAATGATTTTG
TTGATTATCGCTTGTTTAGTCATTCGATGATTAAGAAAATTGGCGGTGGTGCTGATAAAGCGGACAAATC
TAAAAACGACGCTCCAATTATTGTTGGCACATGGCAAACGGTAGTTAAGCAGCCTAAAGAATGGTTCTCT
CAGTTCGGTATGATGATGAACGATGAATGCCACTTAGCAACAGGCAAAAGTATTTCTTCAATCATCTCAG
GATTAAATAATTGCATGTTTAAATTCGGTTTATCTGGCTCATTAAGAGACGGAAAAGCCAATGTAATGCA
GTACGTAGGTATGTTCGGCGAAATCTTCCGTCCTGTTAGCACGTCTAAATTAATGGAAGACGGACAGGTA
ACTGAGCTTAAGATTAATAGTATTTTCCTTCGTTATCCAGACGAATTCGCCACCAAATTAAAAGGTAAAA
CATACCAAGAAGAAGTTAAAATTATTACCGGACTAAAACGTCGTACAAAGTGGATTGCTCAACTTTCGGT
AAAATTGGCTAAGAAAGACGAGAACGCCTTTGTAATGTTTAAACACGTTACACACGGTAAAGAAATATTT
GAAGCTATTAAAGAGCTTGGATACGAAAAAGTTTATTACGTATCAGGTGAAGTTGATACTGAAACACGTA
ACGCTCTTAAAGTCATGGCAGAAAATGGTAAAGGCATTATTATTGTCGCATCATATGGAGTATTCTCTAC
CGGTATTTCAGTCAAGAATCTTCATCATGTTATTTTTGCTCATGGTGTTAAATCAAAAATTATCGTACTT
CAAACCGTAGGTCGTGTGCTTCGTAAGCACGGTTCTAAAGCTGTTGCTACAGTTTGGGATCTCATCGATG
ACGCAGGTGTAAAACCTAAATCATTAAATACTAAAAAGAAGTATACTCATCTTAATTACTTGTTAAAACA
CGGTATTGATCGTATCCAACGTTACGCTGATGAGAAATTTAACTATGTAATGAAAACAATTAATTTATAA
GGGCTTCGGCCCTTAGGAGATAAAAATGGTACTTGAATTTAAACAATTTTTATACGAAGCATCTATTGAC
GAATTCATGGGTAAAATTGCTAGTTGTCATACCTTAGAAGGGCTTGAAGAATTGGAAGCTTATTATAAGA
AACGTATAAAAGAAACGGAATTAAAAGATACAGATGATATTTCTGTCAGGGATGCCTTAGCAGGTAAGCG
TGCCGAACTTGAAGGCGACGATGAGGATGCGGAAGAAGATTTCTAATTAAAAAAAGGCCCGACCTTTTTG
GAAGGGCCAAAAACCATAGGCAAAAAGGTAACACTATAGTAAAAGTTGGGTTTCGTTCAATTGCTCTTCT
GAACTTTCTGAAACCGGCAATTGTTGTACATAATTATAACAAGGACCAGGATGTGCTGGACCTTTGTCTG
TTTCAACAACCAATGCAGAATCGATTGGAGTTTTACAGACAACACAAATCTTATCTGACATGATTGTCTC
CTCTGAATTATATATATCTATTTATAACCCCATCTTAAAGCGCATTTCTTGTACACGCTTTAAACATGCT
TCCATTTCTGCTAAAAGTCTAAATACTTCTTTATAATTTGTCATATTTACCCCATATCTCTCATATGCAT
ATCAATGCCCATATCTTTAGAATAAAAATATTCATCAAGATATCCGGCAAATTTTCCTTTAATATAAAGG
ACATCTTCACCACACGGGTGGTTCGTCAGAATACGAATATCCTGACGTCGTAGACGATACTTTTCCATTA
AGAATTTAATTTCTGTTTCAAATTCTTCATCATTATTAAAGGCATCTTCAATTGAATAACGCATTATTGC
CCCGCTTCAAATTCTCGCATATCTTGAATATGTTTAAGTGCAAAACTACGAGACTTAACCGCATCAAGTG
CACCACTACAGAACTCAAGTAAAATTCCCCAGTATTGTAAAGTAGTCTCTATTTTAAGCACATCTTTATC
TGCGGCCAGGACAGTTTTCATTTCAGATTTCTCGTATCGGTCCATACTGAATTCATCACCATCACCTCGT
CCCGAGTAGTAGTCTAATCTTGCTTTTAGAGCAGTTTTCTTCTGAGTCTCTATACGCAACATTTCTTTAC
GAATAAATGAGTGCTTACGTAGCCATTTGCTGTATAACTTAACATTATTCGCCGTCTCATATTGCAACTT
TGTCGTATCAATAGCTAAGTCTGCGTCTAACTCTTCCTGTAAATCTTCCAGCTTCATAATATTCTCTCTT
TTAACTAATAATCTCCCGGCTGTATCGGAAGGACCTAAAACCATTATACATAGGTTGCCTTGAAGCATTA
CACTCTATTGCTTGACGCTAACTGAAGTTTAATTTGTTCAATATCGTCAGGGTTGTCTACGACCGAAAAT
CTAATCTCTACTATAACCGTATAGTCGTCATATACCGGCGTTACACTTACAGAAAGTTTGTCGATGCGTG
GCTCATAGTTACGAACAGCTGCCTGGATATTACGCTCAATCGTATCGGCTGTAAGTGGTGTCATATTCTC
GAAAAGTTCATCAACCAAATCGCATCCAAATTCAGGGTCGAAGGGGCGTGAGCCTTTTCTAGTTGTCACT
ATGCCAAGAAGACTATTTTTAATAGAACGAAGTCCTACAGAACGAGCAACGTCCTTGTTCCAATCCATAC
GCATTTCTGGGTCGATATCTGAATAAAGTTTATTGATATTAGACATTATAGTAACTCAAAGAATTCTTTG
AGGCCTCGTATTGTGTGAACGTGTGACGCCCCACATTTGGGACATTTAATAGGGGTTGCCAGATAAATTG
ATGGCGACACCAAAAGATTTTTAATATTGATCATGTCATCTTCTGTTATAAGGCCGTAAAGGTCGTTTAT
TTCTGCTTCAGTTAAATCTTCAACAGGGATGGACTCTCCATTGACAAAAACAGCCTCAATACATGAAGCA
ATCATTAATGCGATATTTTTATCATCAAATAATTTAGGTTGACGGAACTTAATTTTAATACCGCTGAACG
AATACCAGGGATCGGCCTGTTCATCTAATTGAGTGTGCAATAAATTCATATAGACTTGAAATGAATGCCC
ACAGGAACAATTCCAGGTGTGTTCTTGATTCACTTCACCTAATGAATGTGCCCACAGATTTACCAACAAT
AACTCGGCTTCTTGTTTAGTCAAGTTTTTAGCGTTAGAGCAATTAGTGATAATATTGTTCACTGCTGATT
CAATAGTACCGGTAGCCCGCGCACCTATGAGTCCTAAATATTCTTTTAAAGTAAAGGCTCTACAATTCAC
TTCTTTATCGCCTAAACGTACGGTAAACGTATATTTGTACATGTTAACTCCTTTATTGTGTATTTATAAA
TAATAGAAAAGGAGTAATTATGGCTAATATAATTCGTTGTAAATTACCGGATGGTGTTCATCGTTTTAAG
CCGTTCACTGTGGCGGATTATAGAGACTTTTTACTAGTTAGAAATGATATCGAACATCGTTCGCCGCAAG
AACAAAAAGAAATAATTGCCGATCTGATTGATGATGATTATTTTGGCGAGTACCCTAAAACATGGCAACC
ATTTATATTCCTGCAAGTTTTTGCAGGCTCTATAGGCAAAACAAAAGTTCCCGTTATTTTCACTTGCCCT
AAATGCTCTAAAGAAAAAACTGCACCATTTGAGATATATCAAAAAGAACTAGTCGAACCTGAACTTGATG
TTGCTGGTATAAAAATACGTTTTTCTTTCCCTGAAAAGTTTTATGACAATAAAGCATTAATGATAAGTGA
AAACATAAAAGAAATATATTATAATGATGAATGGTACCCATGGAATGATTTGACTGAAGAGAACCAAATC
CAAGTAATAGAAGCAATAGACATTGACTCGCTCGAGAAGGTTATTGCTTCTATGAATCCTATTAATTTGA
CCCTTAGATTAGGTTGTTGTGAACGTCATGTTAAAACATATACTGATATCTTAGAGGTTTTTAAATTGTT
AGTTAACCCTGATGAGATTTTTACATTTTATCAGATAAACCATTCACTAGTAAAGAGTCAATACACATTG
GATTCTATTATGCAAATGATTCCTGTTGAACGTGGTATTGCTTTAACATTAGTAGAAAAGGACCATAAAA
AATGACAGTATTCCAACGTCCAGGATATCCTAACTTAAGCGTTAAATTATATCAAGATTATTCGGCTTGG
CAAGAAAATAGATACGTTGAACTCGCGGCAACAATAACAACTTTAACCATGCGAGATTCGCTATATGGAA
GAAATGAAGGGATTCTTCAATTTTATGACACTAAAAACATCCACACTAAAATGGATGGTAGACAGATAGT
CCAAATCTCTGTTTCAAATTCAAACACACCTCTCCAAGTTAGAACTCGAATTTATGGATGTAGACATTAT
TCTGTGTCTGTAGACTCAAAAGGTGACAATATTATTGCAATTGAGCTTGGAACAATACATTCTATAGAGA
ACCTTAAATTTGGACGGCCATTCTTCCCAGACGCAGGAGAATCTATACGTGAAATGTTAGGTGTCATATA
CAAAGACCGTACGTTAATTACTCCGCCAATAAACACTATTAATGCTTATGTTCCTGATATTCCTTGGACA
AGCACATTTGATGATTATTTGGCATATGTCAGAGAATTAGGACTTGCTACAGCGAGTGATAAGTTCGTAT
TCGTATGGCAAGATATTTTAGGCGTAAACATGATTGACTACGATACTCTTATTGGCCAGGAAGGCATTAA
GATGGTTGTAGGCGAGCCAAATACCGTAGGTCAGTATATTCAAGAGCTTGAGTATCCATTAGTATGGGAT
TTTACCTGGATGACTAAAGCTAACCAATTTACAAGAGACCCTATTAAAAACGCCACGGTATTCGCCCATT
CATTTTTAGATACATCTATTCCGGTTATTGTTACAGGTGATGGTGATAACGCTATTGTTGTGTCAAGATC
CGGTGGATATTCCGAAATGACCTATCGTAATGGATTTGAAGAAGCAAGTCGTCTTCAGACAATGGCTCAA
TATGACGGATATGCTAAATGCACTACTACAGGTAATTTTAACATAACGCCTGCTACTAAAATTATATTTG
TTGACCAAAAGAACCAATTCAAATCTGAATTTTACGTAGATGAAGTTATTCATGAGTTATCAAATAACAA
CTCACAAACTCATCTGTACATGTTTACCAACTCAATGGTGTTAGAACCTGTTAACCCAGTTAAGGTTAAA
AATGAACTTAAATCTGATTCTACCTCTAAAGAAAATAATTCTACCACAGTCTAATAAAAAGGTAATGATT
CCCAAATTAGGGCTCAAACATTATAATCTTTTAAAGGACGTTAAAGGTCCTGACGAAAACATGAAAATCT
TAGCTGATTCTATTTGTAAAAATATGAGTCCCGCAGATTTTGATTTTGCATGTCTACACATATTGGAATT
TAATAACAAACTTAAGTCTGAAGTTGAAAAAGACGGATTCACATATAAACTAGATGACGTCTATGTATGC
CAACGAACAGAATTCCAATTCCAAGGCAATACTTTTTATTTTAGACCCCCAGGCAAATTTGAACAATTCG
CTACAATCAGTGAAATGCTATCAAATTGCTTAATAAAAGTTAATGACGAAGAGAAAGAAATTTCTTTCCT
TGAGATGCCTGCTTTTGTAATCAAATGGGCAGAAGACCTTTCGACAACTATTGCTATTCCAGGCCCTAAT
GGCCCTATTAAGGGTATAGCAGAAATTATTGGATTGCTTGAATGAAACCTGAAGAAATGAAATCCATGCG
TAGAAATAAGGTCATTGCCGATAATAAACCACAAAAAGTAGCTGCAACAGCAGCTACCGATTCATTAGAA
GCATTGAATAACATTTCATCAAAACTAGACGATGTCCAAGCTGCGTCTGAACTCACATCACAAAGTGTAG
AAGATAAAGGCAATGGAATTATTGAATCAATTGGAGACTTAAAGAATTCGACAGATAATACTGCTGAAGG
CACAGAGCTTATCGCAGAAGTTATTGAAAAACAAACTGAAGTCACTAAAAGTATAAACGAAGTTTCTAGT
GCAATAAGCTCTAAGTTAGACCGATTAGCTACATTATTAGAGCAAAAATTACAAACATCTACCGCTATTC
AAAATACAGGAGGCACCTCTCTTGAAGTAATTGAGAATGCAATACCTGTTAAAGTGGTTGAGAATGAAAC
TTCTGATGAGTTGTTTAAAGCATTCCCTACACCTGAAAAGATCGATAATAAGCCAGACGAAGATTTCTTC
CCAACGCCGGTTCAAGAAAGTGCTAATTCTACTTCCGATTCTAAAGGCGGGATTAGCTTTAAATTGAGCG
ATAAAATTGCAATGCTCACCAAAACAGTTCAAACCGGGTTTAATAAATCAATATCAATTTCAGACAGAAT
TGCTGGAATGCTTTTCAAATACACTATAACGGCTGCTATTGAAGCAGCAAAAATGGCCGCACTTATTCTT
GGTATTGTTATCGGTATTGATTTATTGATAGTCCATTTCAAATATTGGACAGACAAGTTCACTTCTGCCT
GGGATTTATTTGATGAAAACTTTACTAAATTCTCCGATGAAGCTAAAGAGTGGGGTAAATTCTTAAGTGA
TATATTCACTTCTATTGACTCGATAAAACAATTGTGGGAAGCTGGAGACTGGGGTGGTTTAACCGTTGCT
ATTGTCAAAGGTGTAGGAACAGCATTAATGAACTTAGGTGAACTAATTCAATTAGGAATGGCTAAACTCT
CCGCATCTATATTGCGTGCTATAGGTTTTGGTGATACCGCGGACGAAATAGAAGGACGTGCTTTAGAAGG
ATTCCAAGAAACTACTGGGAACAAATTAAAGAAAGAAGACCAAGAGAAAGTCGCCAAATATCAAATGAAG
CGTGACGACGGGGAATTAGGAACCGTTTCTAAAGGTCTTGATATGTTACAACGCGGCAAAACATTCGTTA
CTAACTGGGTTCGTGGTAATGATAATAAAGAAGAGTTTAGTACAAGCGATGAGCGTGCTGCGGAATCGGC
AAAATTAAAAGAGTTACCTGAAGAGGAACGTAAAGAGGCATATATAAAAGCTAATGAAACTCGGGCAGCC
TTAGTTAGATTTGAGGATTATATCGATAAAATCGATATGACTAATCCGGAAAATGCTAAAAACGTTGAGA
AGTCTTATGCCGATTTAAGTAAACTTATTAAAGACCCTGAACTTAATAAAACTCCTGTTGTTAAAAAGGA
ATTAGATGCTAGATTTGAAAAGCTAAATAATAAAATGGCTGAAGCCAAAAAGGCTCAGACAACAGTTAAG
CCTGAATCTTCGTCTAAATCTCCGGAAGCAAAACAAGTTCAGTCAATAGAGAAAGGACGTGCTTCTGAAT
CTAAACAACAGCAACCGGTAGCGACGATTAGTAATACAAATAATGTCGTCAAAAAGAATACCGTAGTCCA
GAATATGACCCCTGTAACAAGTACAACGGCTCCTGGAATTTTCCATGCCACCGGTGTTAATTAAGGATTA
TTATGATTAGTGTAAAAGAAATAGTAGTAGATGCAAAGGATTTAAATAAAGCAATCCCAGTCTCAGAAAG
TGCTGGGCAAAGCACTAAAACCGAAACAACTACTAAAACTTATGTTGCTCAATTTCCTACAGGAAGAGCA
GCCGGAAATGACTCCACAGGAGACTTCCAGGTAACAGACCTTTATAAGAATGGATTATTATTTACCGCGT
ACAATATGTCTGCACGCGATTCAGGATCCCTAAGAAATTTACGTCCGGCATACGCCGGGACTTCATCTAA
TGGTATCATATCAGATTTAACTGATAATGTGAAAGATGCAGTGACTAAATTCTCAAATGGATTGCTTCCT
GCCGGAGCTAATAAATCTACTATAAATAAAACTCCTGTTGCTAATATACTTTTGCCACGTTCCAAATCTG
ACGTTGATACAACTTCACATCGTTTTAATGATATCGGTGATAGCCTTATTACTAAAGGTGGAGGTACTGC
TACGGGCGTTTTAAGTAACATTGCTTCTACTGCAGTTTTTGGTGCATTAGATTCTATTACTCAAGGGCTT
ATGGCTGATAATAACGAACAGATTTATACGACTTCTCGTAGTATGTATGGCGGTGCTGAGAACCGTACTA
AAGTCTTTACATGGGATTTAACTCCACGTTCAACTGAAGACCTTATGGCTATTATAAACATTTACCAGTA
TTTTAACTATTTCTCATATGGTGAGACCGGTAAATCACAATACGCCCAAGAGATTAAAAGTTATTTAGAC
GAATGGTACCGTTCAACGTTTATTGAGCCTATGACACCAGACGATGCTGTAAAAAATAAGACATTGTTTG
AAAAGATTACTGCGTCATTAACAAACGTATTAGTTGTAAGCAACCCTACGATTTGGATGGTTAAAAACTT
TGGACACACATCTAAATTTGACGGGTTAACTGATGTATTTGGCCCATGTCAAATTCAAAGCGTACGTTTT
GATAAAACTCCAAATGGACAATTTAATGGTCTTGCTGTTGCTCCTAACTTACCGTCAACATTTACGTTAG
AGATAACAATGCGAGAAATTATTACATTAAACCGTTCTTCACTTTATGCGGGGACTTTCTAATGTACTCT
TTAGAAGAATTTAATAACCAAGCTATAAATGCAGATTTCCAACGAAACAATATGTTTAGTTGTGTATTTG
CTACTACACCGTCGACCAAATCGTCTTCACTAATTTCGTCAATTGGTAGTTTTGCTTATAATAACTTAGG
GTTGGATTCAGATTGGCTAGGATTGACTCAAGGTGATATCAATCAGGGCGTAACAACCCTGATTACAGCA
GGAACACAGAAATTAATTCGAAAATCAGGTGTAAGTAAATATCTGATTGGAGCAATGAGCCAACGTACGG
TACAAAGCTTGTTAGGTGAGTTCACAGTAGGAGCTTATCTGATAGACTTCTTCAATATGGCATATAATAA
TACAGGTTTAATGATTTATTCTGTAAAAATGCCTGAGAACCGATTATCTTATGAAACGGATTTCAACTAT
AACTCCCCGAACATCCGAATTACCGGTCGAGAAATGGACCCGTTAGTAATAAGCTTTAGAATGGATTCCG
AAGCATCTAACTTTAGAGCAATGCAGGACTGGGTAAACTCAGTCCAAGACCCTGTAACAGGTCTTCGCGC
TTTACCACAAGACGTCGAAGCAGATATTCAGGTTAATTTACATGCGCGAAATGGTTTACCACATACCGCT
GTCATGTTCACTGGATGTATTCCTGTTAGCGTCTCTTCTCCTGAGTTAACGTATGATGGTGATAACCAAA
TAACAGTTTTTGACGTAACATTTGCTTATCGCGTTATGCAATCAGGTGCTGTAAATAGACAGGCTGCTTT
AGAATGGCTGGAATCAGGACTTATTAGTAGTGTTTCAGGAATGTTTGGAAATAATCAGAATGATTCTGGA
CTAGGAAGTGCAGTATCAAGACTTTCTAGATTAGGTGGGACTGCTGGTGGTGTGTCTAATATAAACACAT
TGACAGGTGTGGTGAATTCTGCGTCAAGAGTTTTAGGACTATAAGAAAAAGGGAGACAACGTCTCCCTTT
AGGGGTTTATTTACGGAATGAAAGGAATGCTGGTGCTCGGAATGGAGTATCATCTTTAGAGTATTTAACT
AATACGACCATTGGTACCTCTGTTTCTAAATGACCTGTCACTACACCTATAAAAATTTGGTCGGTGTGCT
CAGGGTCACGAAAGTTTTTAAGAGGTTCCATAGCAATATGGAATGCACCTGGGAATACTCGATTCAATTC
GTCAATCACAGCTTCGTTAAAAACATCATCTGCTGGAATAACATTTTCAACTACTAGTTCTTGACCATTA
AAGCGAAGCATAGATTTCATAACGGTTTCCTCATGTTGTTGATGGGATGATAGTATAACACATCCATGTG
CTTGTAAACTATCCTTGGACAAATTTAAACGGAACTGATTCTAAATCCATTAAAGATGCTAACAATTTCA
AACCTTTAGGTGCGCTAGTTTTTTCTACAAATGAAGAGAACGATACCGGCTCATCTGATTCGATTTCACC
TGTCATAGCAACCACCTCACCTGTTTCCATGAGAACATCACCATCATAAATGACAGCTTCATCTAACTGG
TCTGAGGACATGACTTCAGCTTGAATAAATTTAAGGTTGGATTCTAAACCTGCACCAGTGTCAGATGACG
CATCTGTAATTTTATTTATCTGCAAGAGAATGCCTCTAGGCAAAATAATTTCTTGCTCATTAGGGTGATT
ACTCAACTGTCCTGGATAAATCACGTTAACTTTATGAGCACCATCAATAGCCCATCCAACGTTAACACGG
ATTTGTTCTGGTGCATGCATAGCTGTTCTTACTTGACTAGGAGAAATAGTAACACCTTCGTCATTATTGT
CAATGTTAAGCTCTTTGCGAACGTTCTTCAGGAGCAAGTCCAAGGGCAACGTTCTCTTTAAACCCACCGA
AAATAATAGGAGCTTGTGAAGTGGAAACATAGTTTCTGAAGTAGAATACCTTATTTTTAACCATTGCTTC
GTAAATAGGCATTCTGATAGACTGAGCTCTATATAACGTTTGTCCTTCAGGTAACGGTCTCCATTTAAAA
ACGCCGAATCAAGACCATCAATAGCGCGTTTAACTTCATCTTCATCTGCAACATCGTAAAAATCTGGTTT
ATAACGACCTAACAACATATTATTGATATCGGTATACGCAGAAGAGGCATATTCACGAATAGCTCGTTTT
TCAGCAACAGAGTATTGTTTAGGGTCCCGATTCATTGTTATATTAAAGGTGCCTCTAGCCGATTCTCGTG
CATAAGTATACATCACATTAGACAAGAACGCTGATTTACGTTGTTTCCAAGTTTTTTCAGATACTTCAGC
TAAAACGTCGTCGGCCAGTTGGAAATTATCACGTCTAAAATCTTCAAACCATTCGTCTTTAATAGAGTCT
GCAATCTCATTTGCAGCTTCAACAAAAGCAGCTAATGCTTTAACAGATGTTGTTTTTTCAGTTTTAATTT
TCTTAGCAAACTTTTCTAAAGTTGGCTTAATAACACCACCATAAGAAACTTCATCAGCAAATTTAAAGGA
TTCATCAATACGATTATAAATCTTATTTTCGATATCAGCAACTAAAGTGCCTTTTGCTGTGGACGATGCT
TGGGCTAGTACTATTTCATATGCTTCAGGAAGTAATTCGGCTGTAGCCGGGCCACTAACTTCTTTAGCAG
AATTTTCGTATTTCTGGAATAACTCACCTTCTTGGCGGTCCGCTTCTAAAGATTGACTTGCTGCAATAGC
ACGACGAGAAATTTTAGTACGAGCAATAACAGGCTTATCTTTACGTTTTTCTTCTACAGCAGCAATAGAA
CCAGCGATAGCCGTTTCTTTGGTGACCTTTTCGCCAGTCTTTTTACTCACATAAACTTCGCCAACATCAG
AATCTACTTTCGTGTACAACTCTGTGTTAATGTTAGGGATGCCTTTAATATCTTCAATGTTGGCATTTTT
ACGAACCATCATCACATAGGTGTGTTTACCTGTGAATTGATACATTGCCGACAATACTTTAAAACGACCA
CCGGTTTTAGTAGAAACTAAACGAGCAAGAAGAGTTTGAAGCTGCTGTCCACGTCCTTTCAATTTCTTGG
TAGGGAATCGGAACAGAACTGCATCCATACGAAGAGCTTTAACCTGTTCATATACTGTATTGAAAATGGT
GTTGATTGCATCAATAGGAGCAGGACCAAGGCCATTTTTCAATTCAGCGAGATTACCCTTTTCAGATAGA
CTCATAATAACAACATGAGCGTATTTGTCGCCAAGTTTAACTTGTTTTACAGCATCACCTTCGGAAAGGT
AAGAGAATAAGCGAACTACGATGTTTGTATCGATATCACCAATTTTCCAGACTTGTGGAACTTTAGCTTT
AGGGTTCAAATTGACGACAGGAAGACTGCCTTCAGATTCAAACACTTCATTTAATTGTTCAGACATAGTG
TTTTCCTTTTAGTAATAATTTATATTTATGCCAAAAAGAGCCCGAAGGCTCTTAATCCACAATCTGGAGC
AAAGTACGATAAACTTCAAAATTAGGGCCTTTTTCGTACTTATCAAAATTGTCCATAAAAATATGATAGG
AATCGTTATTAGGAAAATCTAATACAATTTGGGAACAAGAGGTGGAAACATCACCACCATCTTTATTAGC
GACAACTACTGTTTCTAAATAAGCTTTCATTATACACCCGTCTGGTCCCAGGACCCAAATACGTCTTCAA
ACGAATCCGCTTCTGTTTTATCAAAACGGAACCCTTTAATAATTGGAAGGAAAATACCTACAGTACCTTC
ACGGCCTTTAGAATGAACCCAACCATTACATTCACAATCAGCGATACGTCCAATCAATTTACCTTCACGA
GCTTCGGACATTAATCGTTCACGGTCCAAATCATGACGCTCGTCTAAAGGAATAAGAACCTTTACACCGT
CAACTGTTTTATGAGTTGTATCTTTAAAACCTGAACCACAATCGGTTGTAATACGACGACAACGTGATAC
GAGTTCGACACCACCCAATTTGTTAGGGTCTTTAGAGTGTTCATAGTATCCTACAACTTCTAAAGCTATA
TCAATAACTTCTTTAAATTTAATTAGGTTCTTAGAGCGTTTGTTTTCCCAATATGAATCACGGTTTTTAA
GGATAATACCTTCAAGACCTTGGTCAACATATTTTTTATAAACCACTTTAGCTTCGTCAAGATTACGAAC
TAACTGATTTTCAATTGGCTCAATTCGTTTAAAGCCTTCAGCCATATTTTCAAGAGCAGCAAAACGAACA
TCGTATTTCTGACCTTTAATTTTGCCATCAGAATAGACTTCATCTAAAGGAACATAGTCCCAGGCTTGAA
GAACCATACCTTCAGCTTCTTTAGGAGAAATAGTCCCTTGAAGAGATTTATTTGCTAAACCGTTTGAAGT
GCTACGGTCTGCAACTTGTACTTCTTCGGATTCTTCATTATCACCAAATAAGAACGACAGGTCATTTCCT
GAGCTCACAGCCTTTTTAATATCAAATGAATGATAAACTAATTCGCCGTCGATTAAAACCCCATTAGGGT
GTCTTTCACGAGCTTCTTTAGTCATTTCCATTAGTTCATCTGCTAATAGGGTAAGACCATGGTATTCATT
ACCAGCACGAGAAAAGAATTGAACACCATCATCGCGAACTTCAGCGAAACAACGAGCACCATCTGCTTTT
AATTGAGCAAATGCAGGCCATTTAATATTTTTAGTAATCAATTTCTCATCATATGCAGATGCTAACATCT
GTGGTTGCAATTGAATAAGTCCTGGCCACACCTTATTCGCGATAGACACTGAAGCACCTACTTCAAGGTC
GCGCATCATTACACGACGAAGGACTTCTACATCATCAGGTTTACCGTCAGCGATATAACCCATGAGCTCT
TTAATTGCAGCATTACCAGTGAGTTTACGAGTGGCTAATGTGAACTCAATAAAATCCAACATGTCATCTA
ATTCAAGAAGACCATATGCCTGAGACCTTTCACCTGGCCCAGGCCATTTCTTAATATAATACTGAATGCC
ACGTGCATATGTTAAACGATACACGCGTTCAAGTAATTTGTTGTCCTTATTTTTCTTAAGGATTTCCTGT
TTTGTTTTAGTAGAACCGATCGCAGCTATTTGGTTTAAAATATCTAAAATCATTTGATATCCTCGATTTT
GGTTACGGTTCTATTATAAGCCACTTCATCTAGAAGCGATTTCAGCGTTTTCTGATAAGTGGTAATCCGT
TTACCGAGTCCTTCAACATAATATTCTGAAATGTAGATGAACCCTTGTTCAACACACTCTTTAAATATTT
CTGCGTCTTTTACTGAACGAAACAATGGCCGGTCTCGAAAGAACATGTTAACGTGACCGTAGTCACGCGT
TGTGTTTTTGCCATCTGTAATATCATGAACTACAAACATAATTAACCCTTAACAATTTATAGACCAAGTC
CATTTAGACGAATCTAAAGGAAAGTTTTGAATCGTCCACCACGGCTGCATATCGGTTGGTCCTGGAGTTC
GCCAGGTGTACGGATTTGACGGAGCGCCAATTTGATTAGGCCATGCGCCTGGACTTGTTGCACCAGATTC
TTTAAGCAAATCCGCCAATCGTTTTAAAAGGTCTTCACGATCTGAATCTGAATTATGCTCGGGCGGAACC
AAACGAGATTCAATATCATCCCACGTGTGTACACGTTGTGCAGTGCGAGGAATATCATCACGTTCACCAC
GAGCCAACCAATAAATCGGTACATTAAGAATTTCTGCCGCATGGTCACAGTGATGAGCTAAATCGTCAAC
GTAACAAATCACGTTATATTTTGTTTTAGCTAGTTCGAATAATTGTTCCTTTGAAGAATCATGACCACAC
ATCATTACTTCAGAGAAAGCGCCTGGGAACAAAGCATTCAAATTAAATTGTCTATTCAATCGAGCATCAA
TTGAATCACCTAGCGCCGTCACGGCTACAAAATTATAGTCTTCTTTTAGTTTATTGATAACTCGAAGAGC
ATCCGAATAAGGCGCTAAGTAACGAATAAAATCAGAGCGATTATATTTTTCTATTAATTGTTTACCAAGG
TTATCGTCGGTATTGAACAGTTTACCAGGAGAAATAAATTTTTCGTCCTGAATCATTTTTAAAATATGTT
CTAATGGAAGATTATATTTTTGGGCAAAATAAGGAAGACCAGATTGCCAGCTTAAACATACACCATCAAT
ATCAGTCAAAATAGTAGGCTTCATAAAGAGTCTCTTAATAGGTTTAACACATCAATAAATTCAGCTTCAA
GTTAGTATTGTATCATCTTTTGTTAGACCACTAGCCATGCTGTGCTTCAAAATTTTTCCTTTAGAGGCTT
GTAAGGCATCACGAAACCCCTTGTTTTGGATCGCGGCTTCAAAATATGCATTTGTGTATAATTCTTTCCA
CGCTTCGGAGTATCTTGAAAATGGAACTCCTAACCAGAAGAGAGTCCCACGGTCCTGAGCTCTTGCATAA
GACCTTCCTGCTTGCTGTGCAGCCAATCCAGACAACCCAAATATACTATGTTGTTGTTCAACATTTTTCA
CCTTACATCCTTGGAGAAATCCTTCAAGACCTCCGAATTGAATACCATCCATAACAAAAGGCCATTGAGC
AAAGTTACTTAATGCACATGACGGCCACTTGAAATTACTTCTAATCTCTAACTCAGGCATCTTTAACACT
TATAATTTCAACATCAGCCCAATGACCATAACCAGGTATACGGTCTTCGATAGATAAATTTCCGTCATTT
TTAGGCATTTTAATTGACGTAACGTATGGTTCTAAACGATTTTCTGCGTGTGGAGAAACATCTGTCACAC
GATAAGTAACTTCAATCGTTTCCATACCAAACAATTTCTGGATTAATTTTTTAAGCATTTTATTAGAACC
TCATCTGAAAGCCATGTGATTTAACATTACCGCCGCCAATATCAGAAATGTTAATTTCACTTGCAATCGA
AGGATCGATGTCAATTTCACGATTAAGTTTAGTGATAGCCAAAGTATCATGCCCATTTACTGTACGAAAC
TCCAAAGGACATACTACGTTGACATAGTGTTTAATTGACTCGCTAGTAGGTTGCAAATGGACCGGAAGGT
TTTTAGGTGCTTTAGAGAAAACAACTTCACAAAAGTTTTTGCGGGTATCAAAATAAGTGGTCATAAACAT
AATATTTTCCTCAATTGGGAAGCCGAAGCTCCCAGTTAAATTAGATATCGAATTCATTAAGAACTACATC
AAAGATTGCTTCGAGATGTTCAGGTTTAGCTCGGTTACTCAGGATATGACGAATCCAAGTTTTAACCAAA
AGTTTACGATTAACACCGTTCCAGCAAGGATGAGTACCTAAATCACGCTGACGGAAATCATCATCTAATG
CAATTTTGAAGTTGGAACCTTCCATCGTGATTGAAACCGTGATGCCATTTTCAAATCGCATATAAACGTA
ATTAGGAGTCATGCACTGTTCGATTTCACAAACTGTACCGTTTTTGTGTTTCCATAAGCAAATAACTTCA
GAAGAACCAGCGATACCGTTAGAAACATATTTACGTTCGAAGTTGATGTAGTTCATTTTATTCTCCAGAT
GTTTAAGTTGTTTGTTGGTACAGGTCTATAATAACATATCCTGTACCAAAGTAAACATTTTTTATTTGAT
TTTTGTCCACTTAGCTGAATCAATAACACCTTTTGCTTTAATCTTCTCGATTAATGACTCTGCGCGATTT
CTGGCATTTTCGTACCATACAACGTCTTCAGAGTAACCAGTTTCTTCATCTTCGTAAGTTTTAGAACGAA
TACAGCCATAAACTGTAGAATTCAGACGGTAAATTTCACCAGTGAAAAAGTTTTCGATTTCGATATGATA
ACAAAAATCGTCTGAAGGGCCATCAGGAGTTGTACAATAAACCACATCACCTTGAACTGAACGAACCATC
CACTGTAACTCGTTAACAACTTGAGATTTATATCCATCATGGTCACGGCATTTAATTGTAGCATTTAAAT
TGATAGTGTTCATTTTATTCTCCGGTTGTTTTATTGATTAGGTGGTACAAGTCTATAGAAACACATCCTA
CAGGAGAGTAAACATCTTTTTAAACTTTTTCTGCCCTAAACGCACAAAAGGGAGACCGAAGTCTCCCTAA
AATTATGCAACAACCTTTCCAAAACGAGAAGCATCATCTCGAAGAACTGCACGTGCTCTGCGCATGATCT
TCTCAACGGTTTGATTAATACGAGAGTTCGACCCACGCTTGTATCCAGCGCGTTTAGAGGTACCATCAAC
TTTCTTTTCAACTGCTTTCTTTGCTTTAGCTTGTTTTGCCATTATAAATTCTCTTTAAATGAAAATGCAG
GACTTATTGGCGTTGCCTGCGCAAGCCCTCAACGGGAACATAGGTTTTGGATATTTAACGACAGGATAAC
CATAAACCTCGTCATCATACCAACCACGACTTAGACAGATAACCTTTTTCTGACGCGTGATAGTACAAAA
TACATTCAAGAGGTACACCGTAAAACTGCCGGGGTCTTAAAACTATAATGATTCGCAAATCATTAATCAG
ACAGTTCGACGGCTCCTCGATTTACTTACTTCAGGGTAATAACAAAATGACGTACTGCTTTACGAGCCGC
AGAAGCCAGAGGCTTAGCAAATTTCAGTTCATCTTTAGCTTCCAGTTCAGCAGCCAGAGTAGCCTGAGCA
GGATTCAGATGTTTGAAATAACGCAGGATTTCCAGTGCTTCGGCTTCAACATCAATAGATGCGCCGTAAT
TGTCATGGCCGTTATTCCATGCATGGCGTTGCAGTTCAAGAGCGTGTTGTAATTGTTTAATCATTTTAAA
TTCTCAATTCGAGATAATATTTAGTAGCCACGTTCTTCTGAATTTCACCTTCTTTCGACAAGTCTCTCAG
TTGTAGGCTACCGCTTAGAAGAGTGTTCTCTTCATATAGTTATTTATATCACTTATAAAGACACGGAATA
GCTTTATAGTGGCATGTTACGAATTTCTGTTTAATTTCTTTAGGTTGTTTAAGTCCCAAAGCCACAAATG
GATGTGGAACATTTCGAATTTGTCCAACCGGTAGTGGAGTCAAATCACCGACTTCAACAAAACCTTCAGG
AACATCAGGACCTACAGAATGAACTACACATAGTTCAGGAACTTCACCTTGAACACGTTTACCAATCACA
AGTCCTGATTCAGTAACTTCTTCATCACCTGCTTGAGCGGGTTCAGAAACCAGAATGACATATTCACCAA
CAGCACGAATTGGGAGTTGTACTTCAGACATCTTATTTCCTTGTTGTTTGACGATAGATTAATAATACCA
TACTATTCGTAAAGCATATTACATAAGAAGCAAACGTTCGACCGGAGTACCATCAACCGAAATTACTTTA
TCAAGGCGGAAAGAACGCCACTGACCTAACTTGGTATCGAATGCTCGAACTGATTCACGAGGTTCAGAAC
GAACTTCTGTTGCCGGATTGTTATTTTCATATTTGACTTCAAGTTCATCGCGCGAGGCAAACATCGTACG
AATATCACCGTTAGCCTTTTCAAATACAACACAATGAACGCCTACAGACAGAATAGTTTTAATACGTTCA
CGAAGAACCATAGTTTCTTGTTCAGTTAAAATCATATTATTCACCACAAAAGTTTCGGATTTGTTCCCAA
TTCAGAGAACGAAGATTATTACCGAGAAGTACTGAATTACTTCAATACCAGCTTGGTTTTAGAATGTCTG
CCCAATTTTCAGGAGATCGGTTGTATAATTCTGCGTATACAACCTTTTTAATACCTGACTGCGTAATAGC
TTTAGTGCAATCAGGACACGGAGAAAGCGTAGTATATAACGTAGCGCCTTCAATAGAATTACCTTTACGA
GCTGCAAACAAAATTGCATTCAATTCCGCATGGATTTCGTTATTAGCAGACCATGCACTATGAGCGGCCC
GATGTTCTTTAGCCAAAACAAAATTATCTGCCCGTCCAAATGCTGTAGTGCCTTCTTTATGTCCAGCAAC
GATGGCCGGGCTTGATTTATTCTTCAACCAACCATTTTCGGATGCATGTTCGCAACAGTTAACGCCACCT
GCGGGTGAACCATTATATCCAGTAGAGATAATGCGTCCATCTTTTTCAATGACCGCACCAACTTTCCATG
AACAACATTTTGATTCTTGAGAAATCAAATAAGCAATTTGAAGATATGTGCTAGCTTTCATTATAGTGTT
CCGTATACGCGAGTTGCTTCAACTAAACCGTCACTGCCTAATTTAAGGCTAGTAATCTGGTCACCATCTT
TAGGATTAACGATTATGAGAAAAGAACGTGGAGATTCTTGAATAACTCGTAATGTTGCATCTTGGAAACG
TTCAGACACCTTATTGATGAGTGCTTGAGCAAATTCTTGTACTTTAATCTGAAATTCGTGTACTGTAATT
GGGGTTTCACTTAGCCTTTCGATTTCCCTCATTGTGTTGGTAGAGTTATAGTATCACAACTCCACCATGT
TGTAAACCATTAAATTGCTTTGCATTCAATTTTTTGTGTACCGAAATTGATATCACATTGGATAACTAAA
TCACCGTCAAGATCAAATACCACTATGACGTGTGCAGACCCAGGGAGAAGAGTAATAGCAATAGAATCTA
CTTGGTCTGGGAGCAAAGCATTGAGTACATGAGTTAGTTGAGCATGAACTCTGAGTTCGGCTGCATTATC
AAGCACTTCAAACATATTATTAGCAATAATCTGACTGAAGACTACCTTTACAATTTCAGAATAAGTTGGG
AACATAATTACCTCAGTGTACAGTATTTACTTTAACTCGAACAACAAATCGCTCGGTCGGTTCACCTACA
GGAACAAACTCTACATGATATTCGCCTTTGTAACGAGTATTCAGATCATTACGAATTCCTGCGAGTTTGT
TGATTAATGTAGGACTCATATTAAGTCCCACTAGTTTACGAAGCATTTTGTATGCTTCATCTTCGATTTC
ATGATGTTTATCGTACATAGTTTTCATTTAACCATTCAATTGCCTGGTCGACGTTATCAAATATACCGCC
GTCCAAACGTTCTTCATGCTCATAGTCCAGCACATCAATACCGAACTGTCCATTTACTAAAGGCCAGGCT
ACAAACAAATATTCTTTATGCTGTTCGATGGCCTCAATCACTTCATATAATCGTTTCATTAAAAATCACC
ATGGTTAACTTGCCAACATTCTAAACCAATACGACGCCACATTTCCACAACCTGGTTACGGTCATCAACG
GCTAATTTCACATCATAATAAGGAGCAATACAGTTCCAAAAGAGTTCTTCCTTAACAACATCGTCCTTAC
GAGTGTCACCTTGATTACGTTGAATATGCATTTCCCATGGAATAGAAAACGAATCCATCCATTTTTTAGT
TGCTTCGTAATAACACATTGAATCTTCTTTAGTTCCAGATTCACGACCGCTTACAGTAATAATTGTATAC
CCGGCCTGATGAAGCATCTTAACATATTCGACAACCATAGGGTTCGGGGCGTCTGTGGATAGTTTATCTA
ACTCATACGGACCGCGAGCAACATGTAGAGCTAAAGTCCCGTCAAGGTCGAAGATAACCGCTTTAGGTTT
ACCTGGAGTTCCTTTATAAACTGGAAGACCTTTGTATTCACGCATACGGGAATACATCGAACGTGGAACA
TCGATAGGAACGGTCTTTGTGCCGCGCTTGGCATTACGTTTAACCAATTCGGTCCATGGAACATCGAACA
CTTGATATACAACTTCATGACCCCACTGGTTAGCATATTTTTCCCAGCCAAGACGACGTTCAGGATTTAA
ATTGGTGTCAGAAATAATAACACCCTTAGTTCCATCTTGACAGAGAATCATATGTGCCGCATCGTGTTGC
ATATAAGTAACGATACTTTCTTTCTTTTTAGTATATTTGTACTCGTCACGTTCTTCGTGGCCCATGATGG
ATTGACGATAATCGTCGCGGTTGATATTAAAGAACCCAGGATTCTTAGCAATAAATTCACGAGCCCAAGT
GCTTTTACCAGACCCCGGACAACCTACAGTCAAAATAATCTTTTTCACAGTTTTACTACCTCTTCAGCAA
ATTCAAATTGTCCACCAAGAATTTTAGCAATTTCACGCCCTAGTTCAGCACCTTTCTTGCAATCTTGCAT
AGTCCAAGAATCACCATTCTGTGATTTACGAAGAGCCCGTGTATTGATATCTGCTACAAGCGTATGGATT
AACTTATCAATTTTGGCTTGGTCCATTATTTTATTCCTAAGAAAGTTTCAAGAATACGAATGTTATGCTC
GCGTCGGTCTTTATTAATTTCAGCAACGTTTTTATTAATTGACGTACTTCTAACGTTTGAAGAAATAAAT
TTAATCATATGACTTTTGAGTTGTTGCAAATCCAAACCTTTTTCTTTAGCAGCTTTACGAAGAGCTTTAC
CTGCTTCATCTAGGGCCTTTGCTGCATCTTTATCATAATTGACAAGTGACATTCCACGGCAGATATCAAT
ATACTCATCCGACCATTTGATGTAATTTTCTAGTAATATTTTCATTTAGATTTCCTCAATTATCCATAGG
AGCATTATACTCTGCTCCCGAGAGTTTGTAAACTATTTTACTAAAGATTCGATATACTCATGAAGAGCTT
TAGTCGCTACTGCCCACTTGTTCTGATATTCATTTTTCAGATTAGCACGAGACTGAACTAACAAGCGGTC
ATTAGTCGGAGGCAAAGATTCTAATCGTTGAATCTGACGGCCATAAATCATAGCCGCCATTTCAGATTCA
TAGATAAGCCCTTTAATGTATTCATGCTGTTCTTTAGTCATTGGCATTTTTCCTCTTTTAAACCACTACG
ATAATAACATAACATAGTCTTCTGGTCATGTACATATCTTTTTACGTCGTTTAACCAGATACGAAATTCT
TGAGAGTCTTCAAATGGCATTCCAACCCATGGATTACCATCAATAACCTTTACTTGCCATTTCTGGTTAT
ATTCAACAATAGATTCAGGCCATTGCGGATGTAAAGTTTCTTTAGGGCTTAAGGGCACATCCTGGGCACA
TCCAGCCAAAATGCCAATAGATAATACAACTGCGGTTAATTTAATCATTCTGAGAGCTTCCTGAGGTCTT
CTGCAAAGGAATCGAAGGACCTGTTGATTTGTTTTTCGACCAATCCTGGTTTACTTGCCACCACGTTCTT
CTTCTTCGAATCCTTACGGAGCTTTTCATTTTCGGCCTTAAGTTGGTCAACTAAAACACGGTTCTTATAA
GTCATTTCTTCGATTGACTGATATTGAACCTTGAAGTCGTCTAATACTTTAGCATTGTTTTTAGCGGTCT
CTTTGACAGAAGCTAATTCAGTATTCAACGAATCAACTTTGTTGTTTAAGACAACTATTGTTACCGTAGA
AACTAGAGCAAAAGCTGCTACTATAGCATAAATCGGATTTACTTTAAGCATGTTTTAATAATCTCAATGA
TTTCATCTCGGGATAATCCATTGATAAGAACGGTTTTCAAACCATCACACTGGATTTTGTACGATTCAAA
CAATACACACAACTCTTCTGCTGTATGATACGGGCTTGAAATTCCGAGGCGGTTGAATTTGTCGGTAAGA
GGGTCGCAAATGATGTAGAATTTTATACCTGCGATATGTACGTTTGGTTGACTAATATTAATGAACACAT
TAGCGTCGTATTTAGTCAAATTATTTTGAAGAAATTCTACCATGGCATTAACTGCTTCCGGCATCGCTTC
GCGTTTCTCTTCAGCGTATCGGGTGGAATACTCTTTTTGTTTTACTTTCTTTTTAAGATTTTTGGCCAGT
GTAACACGGAGGTCAGTAAGATAACCAACTGGACGTCCTTTCTTAAAGACTCGGATTCCGTCAGTTGTGT
CTCCAAAAGCGGTTACGACCATATCGTTAGTAATCAATTGCATATTCATAATTTTCTCCTCGTGTTGTTG
ATAAAAGCCATAGTAACACCTTCCTTGGTGTTTGTAAACCATTAATATCCTTCAGGGATGAAATTTTTAT
GATTTTTAATAAAGACAGATTCTAGAGCAGTCATCATTTGCTCTTTTGAACCACCTTGGTAAAGATTCAT
AATGATGCCAAATAGCCAAGGCGACTGTGCGCCCTTACAAATGGCCTGGGCTTCTATAGCATATGTTTTA
CGATCTTTTCCTTTGTGTTTGTCGTATGCGTCTAGGCAGATATAAAATGATCGGTCTAAGAAATCGAGAT
AGGCCTTTTCGAAGAGCTCAACCTTTTTAAATGAAAACTCGTCATCCGCATACATTGCTTTAAGGTCATC
TGAAGCACCGTTCATAATAGCAAGAAACAACTTTTCCGGGCTAGAGATTGAGTCCCGAGTTGTATGAAGA
GCAACGTACCAGTCGGTCTTCAATTTGAAATGAGAACCGTCTTTCATTACGGCTACATATCCTTCGATAT
TTGTAGAAGACTTAACACCTGGGACCCAGTCACCTTCCGGTGCTTCAAATCTGTCTACAAGATATTTACG
AAAAACAGGGTCTAAATAAATGTCGTCATACTCGATATATTTGCCGGTATTGTTATCTCGAATGTTCAAA
AGAATCAATCGTTTTTCTGGATATGTTAGAACAATTTTATTTGATGGGGCAACGTATTCAAAGTTCGCAG
TAAAACCGTCATTACAAAGTTCTAATAAACGATCTGCTAAGTCTTTGTGGTTAATATCTAGTAAAATACT
TGTAGCGGAAGCGGCTTGATCGGATTTGATAGACCCTTTAGATTTGAAACGAACCATATTGCCGTCAAGG
TATGTCGAGACTAATGAACCGTCTTCTTTAGTCATCAGATATTTTACATCGTTAAGGTCAATTGACAATG
TAAACGGGTTCTCATTTAGATTAAAGAATTTTTCCATTGGACGAGAAGCAATACGTAGCGGAGTTTCACC
ATCCATTTCGAACATAATACCACGACACTCTAACGCATCAGGCAGTAACCAATCTGAATATGAAGCAAAG
TTATATGAGAAAATTCGATACTTTTTACCGATTGGACTTACGTCGTCCGAGTAGAAAAATTTACGGTCGG
ATGATGATTTACACAGAGATAACAGATTATAATAAAGCTTTTCCATTTTGTATCCTCAGTTAGTTTTTTT
TAAATTGTACCACAATCCTTGTGGTATGTAAACTACTTTTTCTTATGTTGGATATTCCAAGGCGGGTTGA
ACTTTTTGATAAAAAGTGGTTCTTCAAGGTCCATTGTTGCGATGGTCATTGAACCAAGTTCGTTGGTGAC
TGAAAGGTCAAAACATTGGCGGGCCCAGAATTCAACCTTTTTGCCTTGCATTAAGGCATCCAAAATCATA
AGTGATTTTCTTGAATCTGAAGTCTGGTCTTTTCGATTTATGGCTGTTCGATAATAGTTAATGCGTTTCT
TTAAATTCTTGGTTTTACCAATATACACAAGTTCGTCATCTATAGCAATAGCATATATAACATTTTTCTT
ATTAGGGGCATCAATGGTTTTAATTGTTGCATCTTCTAATAGCTCCAATTCTATATATTTAATAAAGGAA
TATTCGGCGGCAATATCTTTCATAATAAAGTGGGACCGAAGTCCCGTCCTTAGAAATATTTTTTGTATGA
ATTGATTACATTTTGGTCTACATCATTATCAATTTGTGCGACAAGATAAGAACTGATTTCAACTTCCTGA
GGAGCTGCTTGAACTAAATCAGAGTTCAGATATTCACGAATCCAAGGATACGGATGCTTGGTCGGAGCAT
CAGTAATTGGACATGGCAAACCGCACTGTTTCATACGAGACACAGTCAAGTAATCAACAAAAGCACACAT
ACTCTGTGTATTGATACCTGGACATGTACCGTCTTTAAAGAGGTGTGCAGCCCATTCCTTGTACTTGACT
ATTAACTTCCATAAAAATGTCAACTGCTTCTTGTTCACATTCTTTAGCAATTTGAACCCACTCATCGCCA
TCAGTACCAGATTGAAGTTGACGGATAATGTACTGAGTACCCTGAGATGGAGTTGTTCGTCACGAGCAAT
GAACTTCATAATCTTTGCATTACCTTCCATAATTTCCATATTTTTATGGAAGTTGAAAGTACATGCAAAT
GATACGTAAAAACGAATAGCTTCTAAGGCGTTGATAACATGCAAACAGAGATAAAGAGACTTCATTAAAT
CGCGCTTGGCGTTAAACATTATTTCTTCGTACATCTCAATATCATTCTGCTGGCATGAGCCTATTGAACA
CTCATAAACTTCCTTAGCATTTTCCCAATTACGAGTCTTGACTAGAACATCGTCATAATATTTACCTATT
GATTCAGCTCGTTTCATGATTGCTTCGTCTAATACAATCTCATCAAATACTTTGGATGGATCGGTATAAA
GATTTCGCATAATATGAGTATATGAACGAGAGTGAATAGTTTCACTGAATGTCCATGTTGCAACCCACGT
ATCTAATGAAGGGTCGGAAATCAGTGCCATAAGTACCGCAGATGGGGCCCTGCCTTGGATAGAATCCAAT
AATGATTGATACTTAAGATTGTTTGTACAGATGTCCTGTTGGAACTGAGGAAGCTTATTGAACTGTGCAG
AGTCCAACATCAAGTTTACCTCTTCGGGGCGCCAGAAAAATGACAGGATTTCTATAAGTTCTTCAAAAAC
TTTATGACGCTGAATATCATACCGTGCAAGACCAAGACCAGAACCAAAGAACATCGGTTCGTTCAAAACA
TCGACTTGTTGTGTATTAAAAACTGTACTCATTATATTTTCTCACTTAGTTATTAACTCATCCATGAGTA
AATTATAATCAAAAGTCTTAAAGCTTACAAGCAGAGCAATCTTCAGCTTTAGGTGTTTCTAATTCATAGT
CATCTGTACCTGACCCATCACGAGTGTTATGATAGTAGAGATTTTTTCCGCCAAAGTACCAGAAGTAAAG
CAGATCGTCAAGCATTACCGACATTGGCACTTTACCTTTCTCAAATACAGCAGGGTCATAATAAGTATTA
GCAGAAGCAGATTGGCACACCCATTTCAACATGATAGCAACTTGGGTCAAATAAGGTTTATTACCTTTCT
TAGCAAGTTTCCACGCGTAGTCGTAAAGACTCATGTTATGTTCGATATTAGGAACAACCTGTCGGAAGTT
GCCTTCTTTAGATTCTTTAATACTTACAGGTCCACGAGGTGGTTCTATACCATTTGTGCTATTTGAGACT
TGACTGCTTGATTCACATGGCATGAGAGCACTAAGTGTACTGTTACGAATTCCATGTTCTTTTGAGTTCA
GCTCGAAGTTCTTCCAGTCACAGACGTAGTTCGGGGCTGCGATTTGGTCAATCTTTTTATTGTACCAGTC
GATAGGTAATTCGCCTCTAGACCATTTAGTGTCTGAATAATACTCACAAGGTCCTTTTTCTTTGGCGAGT
TTGATTGAAGCTTTGATAAGGCCATATTGCAATCTCTCGAACAATTCATGAGTCAAATAGTTAGCGTCTT
CATATGAAGCAAAGTTAGAAGCTAACCATGCAGCATAGTTCGTCACACCGACACCGAGATTTCGACGCTT
TTTAGCTTTTAAAGCTTCTGGAACCGGATAATCTTGATAGTCTAACAGGTTATCAAGTGCACGTACTTGT
ACTTCAGCAAGTTCATTAATTTTATCTTGGTCTTGCCAATCAAATTTATCTAATACAAAAGCAGATAACG
TGCATAAACCAATTTCAGCATCAGGACCATTCACATCATTAGTTGGAATAGCGATTTCACAACATAAGTT
ACTCTGACGAATTGGAGCTTTTTCACGAATAAACGGAGTGTAGTTATTCGTGTTATCAACAAACTGTGGA
TAAATTCGAGCAGTACCAGAACGTTCAGTCATGAACAATTCAAAGAGTTCTAGTGCTTTGATTCTTTTCT
TTCTGATTGTTGGGTCTTTTTCAGCTTTCTCATAAAGCTCACGGAATTTATCTTGATCTTCAAAGAATGA
GTAATATAGTTCGCCTGACATTTCGTGAGGGCTAAATAAAGTAATATAATCATTTTTACCAAGGCGTTCC
ATCATGAGGTCATTAATCTGAATTCCGTAGTCCATATGTCGAATACGGTTTTCATCCACGCCTTTGTTAT
TTTTCAGAACTAATAGGTTCTCTACTTCTAAGTGCCACATTGGATAATACGCTGTAGCAGCACCACCACG
AATACCACCTTGAGAACAAGATTTTACTGCAGTTTGGAAATGTTTCCAGAATGGAATAACACCCGTATGT
CGAACTTCACCCATACCGATCTTAGAACCTTCTGCACGAAGCATACCAACGTTGATACCGATACCAGCTC
GTTTAGAAATATATTCAATAATTGATGCTGAAGTTTTGTTAATAGATTTTAACGAATCACCGGCTTCAAT
AACTACACAACTAGAGAACTGGCGAGTTGGAGTACGAGCACCTGCCATAATTGGGGTTGGCAATGAAACT
TGATGAGTAGAAACGGCATCATAAAAACGAATAATATGTTTCAAACGGTCATGAGTTTCGTCTTGGTGTA
AGGCCATGCCAATAGCCATGATAGCAAACTGGGGAGTTTCATAAATCTTACCAGTTGTTTTATCTTTAAC
CAGGTATTTTTCTTTAAGCTGCATAGCACCAGCATAAGTCAGATCAAAATCTCGCTCATGTTTAATCCGA
GAATCAAGATAAATGATTTCTTCTGCAGAATATCTAGACAACAACTCAGGATCATATTTGCCTTCATTAA
CACAATAAGAAATATGGTCGATAAAAGCAGGCGGTTCAAACTGCCCATATACATCTTTACGAAGTGCAAA
CATTAGCCCTTTGGCGGCGACATACTGATAATCAGGTTCTTCGACAGAAATCGAGTTAGCTGCAACTTTA
ATACAAATCTTCTGGATATCTTTGGTGCTCATCCCGTCGACAAGATGGGTCTTAATTTCTTCGTACAATT
CATATGGGTCGATTTGTGTTCCTTCACATTGCCAAGTTAAGACTTGAATAATTTTCTGTGCATCAAAATT
TTGGGATACACCACTGCTCTTAGTTACTTGCATATATTCCTCAGTATAGGTTGATAGACATTACTCCAAA
CGGGATAGTATTTATCCCGTTAATTTATTATACACTTTTAAACTGAAGCGTTAATTATTCTTAGCAATAA
TTTCTTTGTATTCTTTAGGTGTCAAGACTGTGATATCGAAATAAACCAATGGTTCTTTTTCCATACCGTA
ACCACCACAAAATTCACGATATTCATAAATTCGTTCATGTGAATAACAAATGAATCGTTCACCTTTAACT
GTGATTTCACTATTCGGTGAAGGGATATCTAGTTCGGTAGGATTTTTCATTTCAAAAATTGTGGTGCCAT
ATGAATTAATAAAACGTAAAATCATTTATACCGCCATTTTAGCTTTGATAGTTGGATGAGATTCGTAATT
TTTAAGAACGAAATCAGAATGTGTCATCGTTCCAGTAACCCAGTCCATTTGGATTTTTGTAGGCCAATTC
TCAAAATTACTAGGCCAATTAATTTCAAGAGAACACAACTCTTTAGGTTCACGACGAAGAACTTCTTTGC
ATTGTTCTACATGATTGCTGTAGATATGCGTGTTGCCGCCTGAGAACACTAAATCACCCGGGATAAGGTT
ACACATCTTCGCTACAATATGCGTCAAGGCAGCGTACGAGGCGATGTTGAACGGCAGGCCCAAGAAAACA
TCTACACTGCGTTGATACCATTGTAAATCAAGATGTCCATTACGCACATTAAATTGATAGAACATATGAC
AAGGAGGAAGAGCCATTTGGTCAATTTCGGCAGGGTTCCATGCAGAAACTATTTGTCGACGATCATTAGG
AAGAGCTTTAATACGGTCGATAGTTTTGACCAATTGGTCTACACCACCAAAATCACGCCATTGCTTACCA
TAAATAGGACCAAGTTCGCCGCTATGATATCCAAGGTCTTTTGCCTGATTTTCATAGTTGTCGTCCCAAA
TAGTTTTACCTTCAATTAGACTACCATGAGTACGAATACGCAAATCATTAACATTGGTAGAACCAGACAT
GAACCACAGTAGTTCGGCAATACAAGCTTTCCATGCAAGCTTCTTGGTTGTTACTGCAGGGAATCCTTTA
GTCAGGTCCCATCGCAATTTAGTTCCGAACAGGGCAATAGTGCCTGTGCCTGTACGGTCGTCTGTTTCGT
AGCCATTTTCTAGGATATCATTAATCAGGTATTGGTATTGTTTCATTTATACACGCTCTCAGTAATTTCG
GTGAGTTCATCGATTCTGTAGTAATGAGATTCTACCATAGAACGTTGAAGCATAATATCTTGGACGAAAT
CTTTATCAAGTTGAACATCGGAATTAACACGACATTTCTTAATGATTTTAGTCATCACGATTTCATCGGC
ATAAGGCAGTGCTTGTTTTAATAATGCAGGACCACCAATAACCGAGACATCAACATGTTCAGTAGAAAGT
TTAAACGGTACGTCGGTTGAAGGGCTAAACAGGTTAATTTCACCACCCATTACCAAGGTAATAAATTCTG
CTTGGGTGATATAGAACCGTGCAAGTTCATCAGTTTTAGTCCTAGGCAGTTTTCTGGCCATATCAGTGAC
AACCATATGAGTACGATCTGGTAGTAGACGAGGTAATGATGCAAAAGTCTTAGCACCCATAACCATTACA
GTGTTTTTAGTGCGAGCAACAAAGTTACTCATATCTTGTTTGATATGCTTCCATGGAAGTCCATCACCTA
ATCCAAAAGCATATTCCAGTTTATCATCAACTGTTTTAGACGGTGCGCATGCGAATACTAATTTAAGCAT
TTTTTATTTCCTCAGATTTTTCTTAATAACTTTCCAATCAGCTTTGAACATTTCAACGTCGGAGTGGTGA
ATCCAGAATCCTGCGCTTTCACCGTCTTCGTAGAGTGGACATCCATCACATTCTTCGTTCCAACCCATTT
CACGTAAAGCTTCTTCAGCTTGTTCAAGGAGTTCAGCGTCTTTACCGACGATGTTGAAGTACCATTTACC
TCTAACTTCTGAATCTTTGATGCTCTGGCGTTGCAATCTCATTTTATTCTCCTCTTCACTTTTATTTGAT
AGGGCTACTATAAAATAGCCCTATCTTGTTATAAACTACTTTTTAAAAGTTTTTTGCAAAAGTTTGATGA
TTTCGTCGACGTTGGTTTCATCTACGATACAATGGATTTTTGTTACACCTAAAGTTATACCTTCGTTAGT
AGGTTGAGGCTTTACTAAATCTACCTCAGTAAAGTATTTGAACTCATCATAATAAATCTCAAAATAAGTT
TCAATTTCACCACCGGCAGAACATACAGTACCATCTTCCATAGTTACACTTACTACGTTTGACGTATCGC
TATCATAATCAGGTTCCATTCCGTTTACAACAAAACTAGGCCCGTGGAGTTCAATCAATTTTAACATCTT
AGCGTTACTGTGTGGTGCTTCTTGAACAAAGTCGTCTTTAAATAAAGGGTTAATGATATAAGATTTTCCA
ATTTCCATTTTGATTTCCTCATTTGTTGATGTGTTGTAATAAAGATTCTGCAAACGTCTCATATGATTCC
AGGTGTTCTTCTTTAATGCGAACTGCATGATTATCACCCGAAGAATAGAACATCTGTACGATAAGAGCTT
CGTAATCAGACGAAATACATGCTACGTTTTCCGGCTTCAGGCATTCATTGTATGTCGCAACTGGGTCAGT
GAAAGCTGCAACGTTTTTGCTACCGCAGTAATCCATACTTCTTTGAATAATAAAAATCATTTTATTTTCC
TCTCATTTGTTGATAAGTCTATAGTATCATGTTTAAAGGAAAAGTAAACAACTTTTTTTGGCAATTTACA
GATACTCAAAAGGGAGACCGAAGTCTCCCTAATTTATTATAGACCAGCTAACAGGTCATCGAGGTCGCCA
TCGTCAGAAGACGAGGAACTCATGAAGTCATCTTCAGTTTTTGCAGAACTAAAGGCTTCCATGTCTTTAT
CAAAATCGTCGAGGTCAGAAGCAACTTTATCTGCAACAGAAGCTGCTGCGGCTGCTGCACCACCCAGAGC
GGCAGTACCAAGAACTTGATTAAATTTAGTATTCAATTCTTCAAACGATTTGAACTTATCTTTAGAAGTC
ATTTCAGAAAGGTCAACCATTTGTTCGAACAATTCTTTCTGGAAAGATTCATCATCAATGTTTGGAATCG
CAGATTGATTCAGGAATTTAGATTCGTCATAGTTACTGAAACCAGAAACCTGTTTAACTTTCAGCACAAA
GTTAGCACCTTCCCATGGACAAGTTACATCAACAGGAGTTTCACCCATTTCAGTATCAACTGCAATCATT
GCATTGATTTTGTCCCAAATCTTTTTACCAAAACGGTATTTGAATACCTTACCTTCATTATCTGGAGCTT
GTGGGTCTTTAACAACCAGAATATTAGCCCAATAAGAAGTTTTACGTTTCAGTTGAGAATATTCAGTTTT
GTTGGTATTGTACAGGTCATTTTTACTAATGTACTGACATACAGGACAAGAGTCATAATCGCCGTGTGTA
GATGAACAGGTTTCAATATACCATTTGCCATTTTTCTTGAACCCGTGGTTAACAAGAATTGCAAACGGAA
GTGCGTCATCTGTTTTTGCCGGCAGGAAACGAATTACCGCTTGACCATTACCGGATGCATCGAGTTTCAG
CTTCCATTCACCTTTATCTTCTGAAGAGAAACCTTTGTTACCATTCAGTTTAGCCATCTGAGCTGCGAGG
TCTGCGGTACTTTTACGTTTAAACATTATATTTACCTTTATTTAGATTATTTAATTTATTTACAGTTGGT
TGCTACGACACTTATACCTCGTAGCTGGTATGATTTATTTATAAAGTAATTTTAACACAGATAAAATAAA
GCTTAATACTTACATGATTTTATTGTTTCTATGAACAATTTCTTAGCAGCATTTACATCGATTTGAAGTA
TTTTTCGATATGCCTTTAATTTGGTAGAATAATTTTGCCAGACTAAATTGTCAGTAAGTTCGTCATGCTT
ATCTATAATATTCAAGAATGAATCCAACAACAAGAAGGTTTCAAACGAAATTATATTGCTTTGTAGCAAT
TTAAATATGTAGCTCGACTGAACTTTATTATTATAATCAAATATCTCTTGAAGCGCACTAACTTCCACTT
TCTTACTGAAATAGTAGATGTTACGTACATCTTCAGCAAACGTCTCCTTGGCTTGTTTGAGACGTCCAAT
ATATTCCCTATAGAAAACTAATGCATCAGCGTCTGATATCTCACCAATCCATGCATCTTGGTTAGCAACT
AAGTTACTGATGAATATCAAAGTGAGTTCCTTTAACTTATATTTCTCTGCTAGTTTCTCAAAGAAATATT
TATCTCGGCGTTTTTGATATGCATTATCCGAAACACGCATGCACCAGTTATATTTGATTACGTCATACCG
ACCATTAAAATGTTGTTTGCACATCAAGTATAGTTTGTATACCGATTTTCCATTAATATAACGTTCTCCG
TCGGGAGGCATGCGTATTTTAATCATAATAAGAAATCTAACGTATTAGTTTTTTCACCACGAGCAACTGA
TGGGCGAAGCATGTTTTCGTCAATTGCTTCGCTTGTAATTTTTTCAACAATTCCTGTAGGAATAAATTTA
GCAAATTGTGTTTCTGGAATAGAATTTTCTTCCAAGAAAGCAGTTGTTGCTTCTAAATAAGACATACCAA
ATTGTTCAACCATGGATTCGATAATGAATCCGTTTTCTTGACGGTCAAGCAATTTAGCGATATCATCTTT
ATCATGTTTTACTGCTAATTCTTGTTCAGATAAACCGGTCTCATCAACCGGTTTAATATCACTTAGTGAA
AACTGTGTCATAAAGCTCGACTACCTCTTCGTTTTCAGCTTCAAATTGGTCACGAGCATCTTTATGATAA
AGAGCTAACAAACGATTAAACATTTTTCCATCAACGCCAAGCTCTTCTTTAGCACGAGTACGAATGTCTT
TAATCAGTTCATTATAACCAGAAATTTTAAGTTTGTTATCGGAAGCTTCCTTGACTAGTTTAGCCAGTTC
TTCACCATGCACATCTTGATTAAATTCAACTGCTTCTTTCTTAGCCATGTTTACCTCAGAATTCATTAAT
TACACTTGTTAATTTAGAAAGACCGGATTTTACAAGTATGAATAAATCTTGCCTTTAGGTTGTGGTTGAT
ATGAGTTATAATACTCTATAATGGTTGAAGCAATATTATCAGGGATATAATCAAAATCAATGAGAACCAA
ATTTTCTTGGTACCGTTTATATTCTTCTGCACTTAATAATACTTCAGCTTGAGAACGATCATTGGCAAGT
GCTTCAATGATCGTTGTTTTCATGCTTGGAGTTCGTTCGCCTTCGACTCGAGTAAACCAGAAATCACCAC
GAACTCGAACAGACGCAACACCATCTTTACGGTCGCCTTTAAGAATTTTAGTCATGCAATCAATTTCGGC
AGAACCATTCTTAATTTTAACCCATTTTTTCTGCGGTGGCGACCACTGTTTAACGTTAGGGTATTTGTGT
AATTGTGTAAAGTCACCATCTGATGCAACAATACACACCTTATGACCAGCTAATGACAAATATTTAGTTA
ATACGCCGATATGGTCATCCGCTTCGTATTTGTCAATATCCATTACAACGTATGGCATATATTTCTTAAT
CTCATCAACGACTTGATGAAGTGCAGTAAAATATCCTTCCCAATCCCACTTTGAAGCTTCACGATCAGTT
TTACGATTTTTCTTGTAGTAGTAAGCAAAGTCGCGTCGCCAATACCCAGAAGTAGCGTTATCCATGCACA
ATACAAATTTTGTATAACCTTGCTTACGGAACATCACTACGTTTTTACGAATTGAATTCAAGACTACATG
ACGAACCATCGGAACGGTAATTTTATCACCATCTTCAAAGTTGTTTAATGCAGCTGCCAATGCAATGTTA
CTAAAGTCTGCAAGCGCAATACCTTCTTTGTAATCTTCATCCAACATCATTTCTAAATCCATATGAACCT
CTTGTTCAGTTAGTCAACTTAGACCATAGTAACATACTAGTTCGAAAGCGTAAATAGTCTTTTACTCATT
TATAAATAGTAAAATAGAACACATAATGATAAGAGGACTACCATGGTTGACATCAAACGTAAGTTCAGGG
CCGAAGATGGTCTTGACGCAGGCGGTGATAAGATAGTTAACGTTGCGCTTGCTGACCGCACAGTTGGCAC
CGATGGCGTGAACGTTGACTTTTTGGTGCAAGAAAACACCGTACAGAATTATGACGAGACGCGCGCGTAT
ACAAAAGATTTTATTGTTCTTTATGATAATCGTTTTTATCAAGCTTTAAGCGATATTCCAGCTCCGGCAG
GCCCTTTCTCTTTGGCTAAATGGAAGGCAACTCGTACAGATGCAGAATGGATTACAGTTCAAGGCGGAGA
TTTCCAATTATCAGTAGGTAACTCTATTGCGGTTGATACTTCAGCTGGCATTGATATTAATTTCACTTTG
CCTCAAAATCCTTTAGATGGCGATACAGTTATTTTGTCTGATATTGGCGGTAGAGTAGGCTATGTAAAAG
TTCAAATTACTGCAGAGGCTCAAAGTATTGTAAACTTTAGAGGACAACAGGTTCGTTCAGTTTTAATGAC
GCACCCAAAATCTAAAATAGTATTCATTTTTAGCAACCGCCTATGGCAAATGTATGTTTCTGATTATGAA
CGTAATGCAGTCACAGTAACTCCTGCTAAGCCATATCAGGCGCAACCTAACGATTTTATCATTCGACGTT
TTACATCAGCCGCTCCTATTAATATTACATTGCCTCGCAATGCTAATAATGGCGATATTATTAATTTAGT
TGATTTAGACAAATTAAACCCGTTATATCACACAATTGTCAAAACTTACGATGATACAACTTCTATACGA
GAAGCCGGTGTTCATGTAGCAGAAGGACGTAATACTGCAGAAGCGTTCTTTGTTTATGATTCTGCTAATA
GCTTATGGCGTGTTTGGGAAGGTGACCAGAAATCTCGTTTACGTATAGTTCGTAATGATACTGATTTACG
CCCTAATGAAGAAGTTCTTGTTTTTGGAACTAATAATGATACAATCTCGACGGTAAATCTTACTTTGCCT
ACAGATATTTTGTCTGGTGATACTGTTAAAATATCGTTGAATTATATGCGTAAAGGGCAAACTGTAAAAA
TTAAAGCTGCTGAAGGCGATACAATTGCTAGCAGTATTTCTTTATTACAGTTCCCAAAACGTTCAGAGTA
TCCACCTGATGCACAATGGGTTTCTGTTAGTGAGCTGGAATTTAATGGCGATACTTCGTATGTCCCTGTA
CTTGAGTTGGCTTATATAGAAGATTATTCATCTGAAACAAAATATTGGGTAGTTCAACAAAACACTGTAA
CCGTCGAACGAGTCGATGCATCGAGCAATACAACTCGAGCTCGTTTAGGTGTTATTGCTCTTGCTTCTCA
AGCACAAGCAAATGTTGATTTAGAAAATGCTCCTGGTAAAGAACTGGCTATTACTCCGGAAACATTAGCA
AATCGTACAGCAACTGAAACTCGTCGCGGTATTGCTCGTATTGCAACAACTGCACAAGTTAACCAGAATA
CCGATTTTGCATTCCAGGACGATTTGATTATTTCTCCTAAGAAATTGAACGAACGTACAGCAACTGAAAC
CCGTAGAGGTGTTGCTGAAGTTGCAACTCAGGCTGAAACTAATGCTGGAACAGATGATACCACTATTATT
ACTCCTAAGAAATTGGATGCCCGTCAAGGTTCTGAAGTTTTATCTGGTATTGTAAAATACACATCTACGA
CTGGTACTACAGCTGCTACTGTTCGTGGTAATGCTGGGACTAACGTTTATAACAAAGCCGTAGATAATTT
AACTATTTCTCCAAAGGCTCTTGACCAGTATAAAGCTACCCATACTCAACAGGGCGCAGTAATTCTTGCT
ATTGAAAGTGAAGTTATCGCTGGCGAATCACAAGCCGGTTGGGCTAATGCTGTAGTGACCCCTGAAACTC
TGCATAAGAAAACTTCTACTGATGGACGTATTGGTTTAATTGAAATTGCTACGCAAGCAGAAACTAACAC
TGGAACTGATTATACTAGAGCAGTAACGCCTAAGACGTTAAATGATAGGAAAGCTACGGAAGGATTATCC
GGCATAGCCGAAATTGCTACGCAAGTTGAATTTGATACTGGAACTGACGATACTCGTATCTCGTCTCCAC
TGAAAATTAAAACTCATTTTGATTCTTCTGACCGTACCAGTGTTAATTCTGATTCCGGACTTATTGAAGA
AGGAACCTTGTGGAACCATTATACTCTTGATATTTCTAAAGCAAATGAAACACAACGCGGTACACTTCGC
GTAGCGACCCAGGCAGAATCTAATGCAGGAACTTTAGATGATGTTCTTATTACTCCTAAAAAGCTTTTAG
GGACTAAGTCCACTGAAACGTCTGAAGGCGTGATTAAGGTTGCTACTCAGGCTGAAACTGTAACAGGAAC
TTCTGCTAATACTGCTGTATCACCTAAGAATTTAAAATGGATTGTTCAATCAGAACCATCATGGACTGCT
ACTACGGCAATTCGTGGATTCGTTAAAACTTCATCTGGTTCTATTACATTTGTCGGTGACGATACTCAAG
GTAATACCCAGGATTTGAATCTTTATGAGAAAAATAGTTATGCTATTTCTCCATATGAATTAAACCGTGT
ACTTGCTAACTACTTACCGTTGAAAGCTAAAGCAGCTGATAGTAATTTGTTAGATGGTCTAGATTCTCTT
CAGTTCATCCGTAGAGACATCGACCAGACGGTTAATGGTTCTTTAAGTCTTACTAAACAGACCAACCTGA
GTGCTCCTTTAGTATCTACAAGCACCGCTTCTTTTGGTTCCGAAGCATCTGTTACTCGTAGATTAACTCT
TAATGACTCTAGCGGTTCCGAAATAGTTTTCACTAAAGGAACCCAATCTCTTAGTAATAAAGAGAATTTC
GTTGTTAGAGCATGGGGTAATAGCGCTACAGCTGGTGACCGTGATACAGTATTTGAAGCGGGTGACGAAA
CCGGATACCATTTCTATTCTCAGCGCGCTGCTGATAATAAAGTATCATTTAATATTAATGGAACACTTTA
TTCAACAGGTATTGTTTCTACAAATGGATTAAATGTTACAGGTGTTTCTACCTTTACCGGGCCTATTAGT
GCTACAGGCGAAATTGTTTCTAGTTCTCCTATTGCATTCAGAGCTATTAACGGTAACTATGGTGTTATGC
TTTATAACGCTGGTAACAGTTCTTATATTGCATTAACTAACTCAGGTGACCAGACCGGGACGTTTAATAA
CTTACGCCCGATCACGATTAACAATGCCACAGGATTAGTTCGTCTTGACAACGGTGTTCAAATCACAAGT
GGTGCAACAATAACTACCGGTGGGTTAACTGTAAATAACAGGATTATTTCTAACGGCGTTAAAACTGCCA
CGGTTTATACCGATAAACCAACAGCTTCTACTGTAGGTTTTTGGTCTATTGACATTAACGATTCTGCTGT
ATATAGCCAATTCCCTGGATACTGGACGCGTGATAACAAAGGTAACCGTGACCAAGAAATTAAATATCCT
GGTACTTTGACTCAATTCGGCAATAGCTTAGATTCGCTTTATCAGGATTGGATTTGTTATCCTACAGGTG
CAAATGGTGGTAGTATTCGATATACTCGTACCTGGCAGAAAAATAAAGACGCTTGGACCTCATTTGCAAT
GGTATTTGATAGTGGCAACCCACCTTCACCTAGCGATGTCGGTGCTATCCCATCCGATAATGCTGTGATT
GGAAACCTTACTGTTCGAGACTTCTTACAATTAGGAAATGTGAGAATTGTTCCAGACCCGGTTAACAAAA
CCGTTAAATTTATATGGGTTGAATAAGAGGTTATATGGAAAAATTTATGGCAAGGTTTGGACAGGGATAC
GTCCAAACGCCGTTTTTATCGGAAAGCAATTCAGTTAGATTTAAGCTAAGTATAGCGGGTTCATGCCCGC
TTTCAACAACTAATCCGTATATTTTGTTCCAAAACGAGCCTTTAGGGTTGCAGTCTTTTGGTATTGGACT
AAATGTTAGGGTGATAAATCCGGAAAATGGAACTATAGTTGATAGTAAATTATACAATTTTGCGCCTACA
AATAATGCAACTTCAGCTGCATTTATTTCGTTTGTTAATACATACGCAGATAATTTCATTTTCGCATTTA
TTTCTAATAACAAATTTAATTTGCCGCCAGAAATAATTGAATGGTTTAAAGCTGCTGGGAGTTCAGTTAT
ACCGTCAATTGAAGTTGCTAGTCTTGTTGATATTTCATATTCAGCGTTTTATGTTTCAGGTAAAAATACT
ATTGCATTAGAACACATAAAATACAGTAATAAGAAAACAATTTCTGATTACGCAACTCCATTAGATATTG
TATATGACTCTATTGCTGATATAGGTGCTACCGGCTATCCTAGACGTACATATGAAGCTCTAGAAACGTT
TTTATCTCCTGTTGGAGGAACTAACAATGAAATAAAAAGGGTGCCTACATCATCCCTTGTTACTCCTATC
GCAAACTATGGATTAAAGCCTACAGATTTTCTTTATTTGAAATTTCAATTAATGGCTGATGAAGAATTAT
TAGAGGAAGGAACCACAAGACTTTCAATTCGTTTCTTTAAGTCTCCATCTAGCTCTCCTATATCATCTAA
AGATATAAACTTTGATGGAACTGCCGGGGAGTGGAAGCTATATGAAGAATACGTTGAAATACCAGCTGAA
GCTGATGGCTTTACAGTATATTGTTACCGTACGGCCTCAGTCGGTCAAGGTGGACTAAGAAATGTTATTT
TCACTGAAGTATCATGTAACGGAAGTATAGCAAAACCCGCCGAGTTTGGTATAAACGGTATTCGTGTTAA
TTACATTGATGAATCATTAACCGGTAATGATATAATGGACTTGCCTACTCAGTTATCTAACGACACAGGT
AAGGTATTTGGGCAGGAATTTAAAGAGTACACAGAATAAAGGAGACTTCGGTCTCCTTTTCGCGTATAAA
TACTTTAATATTAATAAGGAGACACGAAATGGCCGATTTAAAAGCCGGAAGTACAGTTGGTGGTTCCGTC
ATATGGCATCAAGGCAATTTTCCTTTAATGCCAGCTGGCGACGACATCCTATATAAAACATTTAAATTAT
ACACTGAATATAACAAGCCAAAAGCGGCTGATAACGATTTCGTATCTAAAGCAAATGGTGGGACATATCT
CAAAAAGGTAATCTTTAACGAAGGTGTTGCAGTCAAAACAGCAGATGACCAAACGAATGGTATTTTTTCT
GGTGGTGGTGACGCCGCGACATTCGACCAAACAAACATGGATATTGTTTCGTGGTATGGTATTGGGTTTA
AATCATCTCAAGGTACAGGTGAAAGAACTGTTGTAATTGATACTCGCACCGGTAATATAAGTTCTAAAGG
CGTTATTGAAGCATCTCAATTCAGAGCCACAACGTTAGCACCTTTAAATAATTACGACCTTACTCGCAAA
GATTATGTTGATAGTCAAATAAATACAGTTAATGCTAATGCAAACAGTCGTGTACTCCGTTCAGGAGATA
CGATGACCGGCGCGCTAACCGCCCCAAACTTTTTCTCACAGAATCCTGCATCTCAACCCTCGCATGTTCC
ACGATTTGATCAAATTGTTATTAAGGATTCTGTTCAAGATTTCGGCTATTATTAAGAGGACTTATGGCTA
CTTTAAAACAAATACAATTTAAAAGAAGCAAAACTGCAGGAGCACGTCCTGCCGCTTCAGTATTAGCCGA
AGGTGAATTGGCTATAAACTTAAAAGACCGTGTACTTTTTACTAAAGATGACCAAGGAAATATTATTGAT
CTGGGTTTTGCTAAAGGTGGTAGTATTGACGGGAATGTTATTCATACTGGCAATTATAACCAAACTGGCG
ATTATACTTTAAATGGCACCTTCACTCAGACAGGTAATTTTAATTTAACCGGTATTGCTCGAGTAACTCG
TGATATTATTGCCGCTGGGCAGATTATGACTGAAGGCGGTGAACTTATTACAAAAAGTTCAGGTACAGCA
CATGTTCGTTTTCATGATTCGGCTGATCGTGAACGTGGCATTATTTATGCACCGGCTAATGATGGATTAA
CTACGCAAGTAGTTAATATCCGCGTTAAAGACTACGCCGCTGGTGATGAAAGCACCTATGCATTTTCGGG
CAGTGGACTATTTACTTCACCTGAAGTGTCAGCATGGAAATCTATGTCAACTCCTCAGATTTTGACAAAT
AGAGTTATTACTAATAATAAATCTACGAGCGATTATGACATTTATTCTATGGCAGACAACGTTCCATTGT
CTGAAAGCACTACTGCTATTAATCATCTCCGTGTTATGCGCAATGCTGTAGGCGCTGGTGTATTCCATGA
AGTTAAAGATAATGATGGAATAACTTGGTATACTGGAGATGGCTTAGACACTTATCTTTGGTCGTTTACC
TGGTCCGGTGGATTGAAAGCAGGCCATTCTATTTCTGTTGGTACTCCTGGTGGCAATAAAGGATACTCTG
AATTAGGGACTGCTTCAATTTCTCTTGGCGATAATGATACAGGCTTAAAATGGCATCAAGATGGATATTA
TTTCAGCGTTAATAATGGAATAAAAACGTTTTTATTTAGTCCCAACGAAACAACTAGCCTAAGAAAATTT
GTAGCTGGATATTCTACCACCGGAACCGATTTAACTACTCCTCCAACTGAAAACTATGCTTTGGCCACTG
TTGTTACTTACCATGATAATAACGCGTTTGGAGACGGTCAGACTCTTTTAGGATATTATCAAGGCGGTAA
CTATCATCATTATTTTCGCGGTAAGGGTACTACAAACATTAATACTCACGGCGGTTTGTTAGTTACTCCA
GGTAATATTGATGTTATTGGCGGTTCTGTTAATATCGATGGTAGAAATAATTCTTCTACACTGATGTTTA
GAGGTAACACGACCGGAGCTAGTTCAGTTGATAATATGACAATTTCCGTTTGGGGCAATACGTTTACTAA
TCCTAATGTAGGTAATCGTAAAAACGTCATGGAAATTTCTGATGCAACTAGCTGGATGAGCTATATTCAA
AGACTTACTACTGGTGAAGTAGAAATGAACGTTAATGGTTCATTTGAATCATCTGGTGTTACTGCTGGAG
ATAGGGGAGTTCACACAACAGGCGAAATTTCATCTGGGGCTGTGAATGCGCTTCGTATTTGGAATAATGA
TTATGGAGCCATTTTTAGACGTTCAGAAGGCAGTCTTCATATTATTCCAACTGCTTATGGTGAAGGTAAA
CATGGTGATATCGGTCCACTTCGCCCGTTTAGTATGGCTTTAGATACCGGTAAAGTTACTATTCCAGATT
TACAATCAAGTTACAATACGTTCGCTGCGAACGGCTATATTAAATTTGTTGGTCATGGCGCTGGCGCTGG
TGGTTATGATATTCAATATGTTCAAGCGGCTCCTATTTTCCAGGAAATCGATGATGATGCTGTAAGTAAA
TATTATCCTATTGTTAAGCAGAAGTTTTTAAACGGTAAAGCAGTTTGGTCTTTAGGTACTGAAATTAATT
CGGGTACATTTGTTTTACACCATATCAAAGAAGATGGATCACAAGGCCATACATCTCGTTTTAATCAAGA
CGGCACAGTTAATTTCCCTGATAATGTTCAGGTTGGTGGTGGTGAAGCTACTATTGCTCGCAACGGTAAC
ATCTGGTCTGATATCTGGAAAACGTTTACTTCTGCCGGTGATGTAACTAATATCCATGACGCTATTGCTA
CTCGTGTTGCCAAAGAAGGTGATACGATGACAGGCCGCTTAACTCTTAATGCAAACTCGGATGTTATTGT
TATTAACAGTGCTGCAACCGAATCTGGCTATTTGAAAGGACAAAAAGCCGGCGTTGATAACTGGTATGTA
GGTAATGGTGGGGCTGATAATGCCATATCGTTTTATAGTTTCCGAAATAATTCAGGCATAAATGTTAATA
ATGGTGGCGATATTGCTTTAAACCCAGAAGGGTCCGCCACTTTTAATTTTAATAAGGACCGACTTTATAT
AAATGGTTCGGTTTGGACCTCACACCAGGCCGGCGATTGGGGAAATCAATGGCGCCAGGAAGCTCCTGTA
TTTGTGGATTTTGGCTACGTCGGTAATGATAGTTATTATCCAATTATCAAAGGAAAATCTGGTATTACTA
ACGAAGGATATTTTTCAGGCGTTGATTTTGGTATGCGACGCATTCCTAATAACTGGGCACAAGGTATTAT
TCGTGTTGGTAACCAGGAAAATGCTAGCGATCCGCAAGCTATCTTCGAATTCCACCATAATGGAAACATG
TACGTTCCTGACATGGTTAAAGCTGGAGTAAGATTATCAGCTGGTGGAGGTGACCCTGCATGGACAGGCG
CATGTGTTGTTATTGGTGATAATGACACTGGGTTAGTTCATGGCGGTGACGGTCGTATTAACATGGTTGC
AAATGGAGTGCATATTGCTTCGTGGTCAGCTGCTTATCAGATCCATGAAGGTCTTTGGGATTCAACTGGT
GCTTTATGGACTGAAACAGGAAGAGCTATTATTTCTTATGGGCATTTAGTCCAACAAAGTGATGCCTATT
CCACATATGTCCGCGATGTTTATGTCCGCTCTGATATTCGTGTTAAAAAGAACCTCGTTAAATTTGAAAA
TGCTTCTGAGAAGCTTTCTAAAATTAACGGTTACACTTATATGCAGAAGCGAGGCCTAGATGAAGAAGGC
AATCAGAAATGGGAACCTAACGCCGGTTTAATTGCTCAAGAAGTTCAAGCTATTTTACCAGAATTAGTTG
AAGGCGACCCGGATGGTGAAGCTTTACTTCGTTTGAACTATAACGGTGTAATTGGTTTAAATACAGCTGC
AATCAATGAGCATACTGCAGAAATTGCAGAACTTAAGTCAGAGATTGAAGAGCTTAAAAAATTAGTTAAA
TCATTGTTAAAATAATAAGAGGGGCTTCGGCCCCTTGGAGGTGTATATGGCAGTTGAAGGACCGTGGGTA
GGATGGTCTGCAAGGGTACAGACTGGAGATCCTTGGATGGGTGGTGCCGCACAGAGATTGAGAATGGGAA
TTCCGTTTTGGATGAGTAATATGATAGGTCGATCTGTTGAAGTAATTCACACGCTTGGAGCAGACCATAA
CTTCAATGGTCAATGGTTCCGAGATAGATGTTTTGAGGCAGGTAGTGCACCTATAGTGTTTAATATCACC
GGAAATTTGGTATCATATAGTAAAGATGTTCCATTATTCTTTATGTATGGCGATACACCAAATGAATATG
TTACTTTGAATATTCATGGTGGAGTTCATATGTGGGGACGAGGTGGTAACGGTACTGTAAACGGAAACCC
AGGCACAAATGGCGGCGATGTAATCCAAAATGATATCGGCGGAAGACTTCGTATTTGGAACTATGGCGTT
ATTGCATCAGGCGGCGGTGGTGGTGGTGCAGTGTCATTACAGAATAGCTGGGCGCCAAATGCTACAGCAG
GCGGCGGTGGTGGTAGACCATTTGGCATCGGCGGAGGCGGCGTTAATTGGCCGGGTGGTAATGCTAGTTA
TGACGCCCCGGGCGGTGCCGGTTACACTTCCCAATTCGGCGGAGGCAATGGCGGTGATGCTGGAGGTCGG
GGCGGAGATGGATGGGGTAATCACTTATCTAGATCTGGCGGTGGTGCTCCTGGCAGAGCAGTATTCGGAA
GTTCACCGTCATGGGGTGCTACAGGCACAATCTACGGCTCCTGGATTTAAACGATAATACCTCTCAATTA
TAAATATTGATAAATGGGAGGTAATATGGCAGCACCAAAAGTATCATTTTCGCCTAGTGATATTTTATTT
GGGTTGCTAGACCGCATTTTCAAAGATAACGCCTCTGGAAATATTCTTATTTCAAGAGTTGCTGTTGTAG
TTCTTTTGTTCCTAATGGCACTAATATGGTACAAAGGGAATATTTTTATGGATTATTACGTGAGGTCGAA
ATATGATACTTACACAGAAGTAATTCAAAAAGAAAGAAATACACGATTTGAATCTGCGGCTTTAGAACAA
CTACAAATAGTCCACGTCACATCAAGGGCGGATTTTAGTTCGGTGTATTCTTTCAGACCTAAAAATCTAA
ATTATTTCGTCGACCTTATTGCGTATGAAGGTAAGTTACCTAGCACAGTAACTGAAAAATCTATGGGAGG
ATTTCCTGTCGATAAAACGACAGCAGAATATTCGGTCCATTTAAGTGGACTTCACTTTACTTCTAAAACA
GATTTTGCTTTCTTACCTACCAAATCAAAAACTCCGGAACTGGCATATATGTATAGTTGTCCTTACTTCA
ATTTGGATAACATATATGCGGGAACTGTTTCTATGTATTGGTATAAGGGGTCGGATGTGTTAAATGAAGA
ACGCTTGGCTGCAATATGCAACCAAGCAGCAAGGATATTAGGGCGGGCTAAATAATTAGTTGTTAGAATA
CATCGTCAAATGGCGATAAATATTTTCAAAACCTTCATTGAATTCACTAATCAGTGTTTTCTTTTCTTCG
GCAGTTAAATTTGTAATTAGTTTTCTGAACGAATTCTGATTTAGCTGCCGACCATCTTTTTTAATTCCAA
TCTCATTCAAGAATCCGATGAAATTTGCTCGGTCTTCAACAATATCTTCCCTAGAGAATTTAATCAAAAT
AGAAGCAATAGTAATAATTTCACGTACGATTTCAATGTCTTTATTCATAACGTTTTATTCATTCCATTTG
GTTCGATATGAGTATAGTACCATTATCAGTGTTGATTGTAAACAGCTTTTTCTACACTTTTAACGTAATC
AGTGTAGTCTTCCTGTTCATACGAGTGTAAGGCCAAGAACGTGGCTAATAGTTCATTATAGACTAAAGCC
TCACGCTCACGTTCGGCCTCTACTACGTTCTGAAGATTATGACTCATATTGTTCCTTATAACTATCAATG
TAGTCCTGTATGTCGAAGAATGACATTTCATATTCTAGGACATTAAGAGCCCGTTCTTCAGTATAGTCAG
AACCAAATACGATAGTGATTTCACCAGGCTTCATACGATCGAAATCAACACTAAAATGAATACGAGAACA
TACTTCGTCTGCCATATCTGCAACAACACTACGATACACTTCTCGGTTAACCTGATAAAGCTCTGCAAGT
TCTTCACATCGAATAACAAGTTCAGTGGCAGGATTTTCTTTTATTTTAGTAAGCATAGTCTTTACCCTTA
TGTTTTTGTTTGCGTTTAGATTGAAGTTCCGATTTCTTCTTGTCCTTATGGACGGAAGCCTTATTGAAAT
CATGTTTTGCTACAAGATTGTTCATAATGATTTATAACCTCATTTAAACATTTATCGGTAAAAGAAAACT
TTTTAGCCACAGAACATTCGATAATGTGTTCTTTCAAATCTTTAGAGTCAGTATAACCCATCTCAGTAAT
AAAGTGGCGAATTAAAGCTTTATTCTTATCATTAACAGAATTAAAATAATCTGCTTTAGAATCAATTATT
CTCATCATCTAATTTCCTTAATTGATATTGCAACGAGCTAATAATTTCTTCGTTCATTTTAATATACATG
TCACGCAAGAAAGGTTTTAACCCTTCACGAATAATTGCTAATGTATCACCTTTACATAAATTAACCAAAT
ACGGATGATCTAAAGCGTCCCAACCAGGCTGATTAGCATACATGCCATAGTTTTCTTCCATCATATGATT
AAGACGTTTGATATCTTGGATACGTGATTCAATAGCATCTTTCTGGAGTTGTTTAATATTCATTAATAAA
GGTCCTCTGAATAAAGTTCTTTCTCACTTCCACCACGTTCAATACGTACCTGTCCAGCATACGTTGCAAT
AATCATTGCTTCTTCACGCGTCCAGTAATTAGAGTATTGGTCAATAAAGCCTTGGTCGTCACCACAAACT
TGTTGCGAGACTAATTGAGGACCAACTATATCAAGTACTTCAGCCATATCTTTAGAGTAATGACGAACTC
CAGGAATAATCAGAGTTCCGCCGCTCTTCAATTTAAATCTATTAGCTGCACATACTATAACACGTTGAAC
TTTTTGGTCATTGTTCCAATAGCACGTTTGCCAACAGATTTCAGGAACTTCATTCATTATATCATCAGCA
GAATAATTATAACCGTAGGACTGGAATTTTTCTGCTAGACTTTCAGGAGTCTCACGAGACAAGGCCAAAT
CTAATAGCTCTAAACGTTCTTTAAATGATTTCATTTAAGCCATTCCTTAATACGTTGCCAAATAGATTTT
TGTGATTGTTTATTTACACCAATCGAACGAATAACCGGTTGTGACTGCTGATATTCTTTATAATCTTCTT
TATAGATTTCGTAAGCTGCATCAACAAATGAACTGATCGCTGCCATGTAGTTTTTACGAAGGCCAAATGG
CGCGTCATTATTTTCACGAATAACCGTATATTGGCCTGCTTTAATCTTTACAATTGTCCCTAAATAAGCC
CCGTGGTACCAAATATCCCATCCTTCCTGAGTAGGTTCTGCACATTTACGAAGTTCGTTAATAATATTCA
GCTTATTCATTATGTATTCCTCACAGTACGTTAGTTACAAGGGTAATGATTTCTTTGGACACATTAGGGA
AGTCAATGTAAGTATATTTACCACCGATCTTAATCTTAACATCATTTTCAAGAGAAGTAAACAGCTTTGA
TTCAGTTTCTGACATGTTGTATGCAAAGATTCTAAGAGCGCCATCTCGTCGAATTTCAATTTGGCGAATG
CCTAGAACTCGTTTAGCGAATCGAACTTCTAAGTTACTACGGTTTTCACCAATTTCTTTAACTTCAACTT
TATCTTTAATATTTTCAAAAACAAAGTTTGCTAATTCATGCATTTCAGGAGTAACTCCACGTGCTTTTCT
GGTGTTACGTTTCTGAAGAAGTTCTGGAGCATTTTCTTGGGCAAAGAGGTCTGCAGCTTTTTGGATAATA
TCCATTGCTTCGCCGGTTGCCACAAGTCCATCACCAGATTTTTCGACTAAACCTTTCTTAATCAATACAC
CAATGTTAGAGTTAACAACTGATGCATTGTATTCTGCTTCCAGAGCTTCACGGACATTGGCAGCAGTGGT
GAAGTTGTTCTTAATGATATAAACCATTATTGCAGCAGTTTTTTCATTCAGAGCGTTTTCAGAAGCTTTG
ATGATGTAAGTAACTTTAGACATTTTATTTCTCCAAATTAGTATTTGTTTTGATAGGTCTATAATATCAT
GTTTGAAGCATATGTAAACTGTTTTGTGAGAAAAAAATGCACAAAAGGGAGCTTCGGCTCCCTAATCATG
TTTGTCCAACCAATACAGCCAAATCACTAATGCAGCTATTGCACCGAGAAATCCTAAGGCTAGGGCACTC
AAAGTGCCTCCAAGTCTTTAGTGTACTCTGTCACAACATCAGTAGACTTCCAATACTCATTTTCTTCTTT
CTTAGCTTTAGCTTCTTCTGCCAGTTTACGTGATTCATCGGAAGTGATATGGAAGATGTTAAGACCTACC
AGTTTATCGACATGTTCTTTATACATTTCGATTTGTGCTAGCTCTTCAGTCAAAGCTTTACGAGTCTTGC
CCTGAATCACAATTTCGCCACTGATAACTTTTTTGATGAAGTGGGCCTTAGCAAAAGCAAGTTTAAATGC
TTTTTCAGATTCAAGGATTTTGTTGTCAATACGTTTCTGAACGTAAGTCTTACGGACTTCAACAAAATCT
TTGATTAAGTCCACTACGTTATCGTAGACAGCTAATTTACCCTTTTCATTAATCACTGTGATGTTTTGTG
AACGACGTTCGATGAGACTAAAATCTTTCATGATTTTTTCATGACGTAGCTCTTCATCATCAGGAAGCGA
GTACTCTTTACGGAACTTCACCTTAAACCCAAAGCCGTGTTCACCGCAATCATCTTCCCATGAGATTAGA
CCTTTGTCTTCCAACGGGTCAAGAACCTTACTCACATACGTTTCACGGTCGAATTTATATGGGATTTCAG
TTATCTGCATTTGAGTGCGAGATGTGAACTTATATGTTCCGTGAATCTCATAACGCCCATCAACTTCATG
TACTTCACCACGGAATTCCGGGAATTCAACTTTTGGCTTAGTGACATTTTTACCTTGAAGAGCTTGTAAT
ACGGCCTTTTTGACCGATTTAAAACTATGAGGCAGAATATTTGTTGCGTAACCGGTTGCAATACCGGAGA
CACCATTCAAAAGAACTGTTGGAATAATAGGAAGATAGAATTTTGGCGGAATGTGTTCTTTATCTTCATG
AGCTGGAGCATATTCAGTATCTTTATATACGTTATAGAAATTTTTACTTACACGAGCAAAAATATAACGA
GATGCTGCAGCCTTTTGGACTGTTCTAGAGCCAAAGTTGCCTTGGCCATCTAACAGTGGATAGTTGTTAT
TCCATGTGTTAGCCATCAATGCACCTGCATCTTGTGCAGAAGATTCACCATGGTGATAACCTAAATCTGC
AACACCGCCTGCAATTGACGCAAGTTTATGAAATTTTTCTTTATTACCACGAGCCAAATCTAACGCACGA
TGAACCACAAAACGTTGAACCGGCTTAAATCCATCAATCATGTTCGGGATTGCACGGTTTTCAACGGTGT
ACATCGCATATGCTAAGGCTTCGTTATCAATAATACTTTTTAGATTACGAGAATTCAATTGCATATTTTC
ACCATATTAATGAATGAATAACCATTATAACATCTGAAATGAAAAGCACTACTTGGACTAGTCCAAACAT
CACACCATAGTACAGAACCGTAAGCAACAACAAGAGCCCTAAGGCTCCTGCTAAGATTTTCTTAATCATT
ACTCGCCTTTTAATACGTTAAGAAGAGCTAAGACTGCTAAGGTACCTTGTGATACTGCTTGTTGAAATAC
TGTTGTTTCGCCTGTAACTAAAGTGTTAACGAATAAAAACGACCAACACAGCAATGCAATAATCCATGCT
ACCATTTTAATTACCTCACAAATAAATTAAAGGCCTATTAAGCTAGGCCTATATAAATTAGTAACTCTGC
AGAATGAATCTGAAATTATCTGCCAGAAGACGGTTCATTTCAGTGAGTGTTTGATATTCTGATGAATGAT
TGCGAGTGAACGCCAGAGCCAATTGACCTTTACCGTAACCAGTAGTCAGAGGTTTCATGTTCTTAGCTGA
AACAAAGATTACATCATATTCAATATTGTTAGTGCCCATGGTACGGGCTAGTTGCGAACGGCCTTGACGA
ATGTGAGAAAGAATTGCATCCAACCCTTGTTTAGAACGTTGACGTCCTACAAAGAATCGTGCTGCTACTT
GTCGCCAATCAGATGAACCTTTAACAAAGAAGTAAAAACCTTCACGAGAACGAAACTCTTTAGAAACTTC
AGAACCGTATTCGCCATTACGAACTACTGCAACAACTTCACCGCCAACTGCCAGAAGGTCTTTACGAGTT
AAATATTTGGACATGCTAATTTCCTCAATTGATTAATGTTTTTGTAATCCATGAGAGCATTATACTCTGC
TCTCAAGAGTTTGTACAATTTTATTCGGTCATATCAGAACGTTCAAAAAGCTCTTCAACAGTTAAACATT
CGGTGTCATCCTCAATAAAGAATCGGGTCCAACACGTTGGGGCGATGCAGTTATGAGTTTGTCCGGCTAT
AGAAGCTACACGAATAAGCTGCTGACCATTATTCAGGACAAATTTTTCACCAATTTCAACATCTTTAAAA
AGCTTAGCCATTTTGTATTCCTCGTGTTTTGATAGGACTACTATACCATAATCCTACCTTGATGTAAACA
ATTAAATTACATTAAAATATGTTAAAGCCAACCATGTTCCGGTGAACGAACATGCGATGTAAAAACCTGT
ATCGCAAATTGTTCTTAGTACAATAAGAAGTGCATTTTTCATAAGTACCTCAATACAATTGAAAATATTA
TACAAATCATAGGGATACTAAGCAACCATATTCCGATCCACATTTTAGAGCTCATATCTCAACTTCCGCG
AGTTCCATATATCCTTTGTTGATAACCTCTTTAAGGTCTTTAGAAAGAATAACACTAAAATGGTCGTTCA
TATGTCCATTAACTAAACGAGTTATTTCGGCTTCAGATGACATATAAGGCACGTCTGAGTCCCAATGAGA
TAGACCTAAATGGGTATAAATCATCCCTTCGTCGTCTGCAGTGTTGTACATTGAAACAAATTCGCCTGTT
ACTTTATGTTTTGCGTAGAAAAATTTAAATTTCATGATGTTATCCTCTTTTAGATAGGACTACTATATCA
TAGTCCTACTTAGTTGTAAACACTTTTATGAAATTAAAGATGAAGATACCACCCGTTGTAGTTGCTCTTG
CGGACGATTTTCTTTAGGTCTTCATGGTCTCCCACGAACTTTATAGAATAAGAGAAGACGTCAGGTGAGG
TTTCTTTGACATCTAATATAATAATGCAATCTGCGACTCGATGGTTCAAGAAGGGCCCTATATTGATTCC
ATTACCACCAGGATAATCACCCCTGTATCCTGTGGTAACCGAAATCCATTTACAATCTATCTGGTGCGTT
TTGACTTCGACACGCAACCCGCAGTATTTAGGATGAGCTAACACGTCCCATGCATACGTGTACGGGTCTT
CTACGTCTTCATTACCTTTATTAACATATCCGTCTAGCCAATTTGCTACTACATACTCTGCAAAGACTGC
AACCTTACAACGTCGAACAACGTCTTCTTTTATTTGACCTGGATCTTGTTTCAACGAGTACCGAGCAGTA
TCAGCGATCTTAACCTTCATTTCGCTAGTCAAAAACTCATTCGACAGGATAAATGTCGGAAGACTCTTCA
GCCTCAACAGTCCCAAGTTCGTCTTTACCATAGATACCTCTGATGTGTAGTTCACCAAAATAAATGCGGT
CACCTTCTTCAAGATATTCTGCATCTACAGGCGGAATTTCAATAACAACTTCGTCGCATTCTAACCAGCC
GTAGTGTGCATCGCCAGGATGTTTTACCAATTTAGCACAATAAACTGATTTACACTTATGATGACCACGA
AGATTAGCAATTTTGGATTCTGATACGTCAAATGGATGAATCATAATTACCCCTAAAGAAAAAAGGGGAC
CGAAGTCCCCAATTATTATTCTGCAAATAATTCAGTAACGTCTGAAATTACTTCATAACGACAAGTACGG
GTCGTAGCATCGCCATAGTCAACTGGGATGGATACAACATCACGTGGATGAACTTTAACCTTAACAACTT
TATCTGAGCTAGAACCAAAGTAACGAATATATGATTTAGCGCAAACATGTAGACCACGGGAGCAGGTTTG
TGTATCATCATCGTTAACACGAGTACGAGGCATTGAAACAACTTTACCAGGCGAGTTATCAAATGTGCCA
CTATAGCAATCTAAATAGTCTTTACGAACTACTTTCCACGCATAGAAATGTCCGTCTTCAGTGATTTCAA
TATCGTTTGCAACCAAGAAGTCGAATAAACGTTGTACAGCTTTTTCGCTTGGGTTTTCTAACAGGTTTTC
AAGGAACGGCAGATAGAATTTAAAGTCTTCGCCTTTTTCCATAGAATCAATAATACGATTAACCAGTCCT
GAACGAATTTCTATACCTTGATAAAATAAACTACCACCTTCAATAGTAACATTACCGTCAACAAACTTAG
TAATAGCTTTCTTGATGTTAATAAGTTCGACAGCTTTACTAAGGTTTCCTGCGACCAAATTAGCTTTAAT
TTCTTCAAAATTTGCATGACTTGATGGGGTCGCATTGTATGCTACGCGTCCTTCAATGATTGAAATAAAT
TTAGATGATGCGTTCCATACGATTTCTGGACGATGACCTGTAATAATAGGTTCATTATTTTCTGGGACCT
GTTCTTCGTCTTCAAATTCAGCTGCTTTCTCTTCAGCTTTAAAATTCTTAACAATCTTACGAAGAGTATC
TGTTGAAATGTCGAAGTAATCGGCAATTTCTTTACGAGTCCATTTGCCTGATTCAACCAGGCCGTAAGCT
TCTAACTGTTCTTCTTGGGACAAGCATTTAATATTGTACATAATGTTTCC
bolA promoter sequence (SEQ ID NO: 13)
AACCTAAATATTTGTTGTTAAGCTGCAATGGAAACGGTAAAAGCGGCTAGTATTTAAAG
GGATGGATGACATCTCAGCGTTGTCG
P_{J23100} promoter sequence (SEQ ID NO: 14)
TTGACGGCTAGCTCAGTCCTAGGTACAGTGCTAGC
Repeat Sequence (SEQ ID NO: 15)
CGGTTTATCCCCGCTGGCGCGGGGAACTC
Promoter sequence (SEQ ID NO: 16)
TTGACGCGTAGCTCAGAGGTAGGTATAATGCTAGAAC

1-60. (canceled)

61. A composition comprising a first type of transduction particle comprising
(a) a nucleic acid encoding a Cas, wherein expression of the Cas is under control of (i) an E. coli BolA promoter comprising the nucleotide sequence set forth in SEQ ID NO: 13 and (ii) an E. coli J23100 promoter comprising the nucleotide sequence set forth in SEQ ID NO: 14; and
(b) a T-even phage capsid.

62. The composition of claim 61, wherein the first type of transduction particle comprises an adhesion moiety capable of binding to a cognate moiety selected from the group consisting of an LPS, a LamB and a Tsx, each displayed on the surface of E. coli cells.

63. The composition of claim 61, wherein
A) the first type of transduction particle comprises an LPS adhesion moiety and a LamB adhesion moiety;
B) the first type of transduction particle comprises an LPS adhesion moiety and a Tsx adhesion moiety; or
C) the first type of transduction particle comprises a Tsx adhesion moiety but is devoid of LamB and LPS adhesion moieties.

64. The composition of claim 61, wherein the first type of transduction particle comprise an LPS adhesion moiety; and wherein the composition further comprises a second type of transduction particles, wherein the second type of transduction particle comprise a Tsx adhesion moiety.

65. The composition of claim 61, wherein the composition further comprises a second type of transduction particle and a third type of transduction particle; wherein each of the first type of transduction particle, the second type of transduction particle, and the third type of transduction particle comprise different adhesion moieties for binding to a cognate moiety on the surface of E. coli cells.

66. The composition of claim 61, wherein the T-even phage capsid is a capsid of a phage selected from the group consisting of a T2 phage, a T2-like phage, a RB69 phage and a RB69-like phage.

67. The composition of claim 61, wherein the Cas is a Cas nuclease.

68. The composition of claim 67, wherein the Cas nuclease is a Type I, II, III, IV, V or VI Cas nuclease.

69. The composition of claim 68, wherein the Cas is a Type I Cas.

70. The composition of claim 69, wherein the Cas is a Cas3.

71. The composition of claim 70, wherein the nucleic acid encodes a cas3 gene and cognate casA, casB, casC, casD, and casE proteins.

72. The composition of claim 61, wherein the first type of transduction particle is a phage or packaged phagemid.

73. The composition of claim 72, wherein the phage is a lytic phage.

74. The composition of claim 61, wherein the nucleic acid comprises at least one crRNA or guide RNA that is operable with the Cas for targeting the genome of an E. coli cell, wherein the Cas is a Cas nuclease, and wherein each crRNA or guide RNA comprises a spacer sequence that is complementary to an E. coli protospacer sequence.

75. The composition of claim 74, wherein the E. coli cells are cells of E. coli phylogroup B2.

76. The composition of claim 75, wherein the E. coli cells are of a strain selected from the group consisting of ST131 and ST1193.

77. The composition of claim 74, wherein the E. coli protospacer sequence is comprised by a gene selected from the group consisting of fimH, bolA, rpoH, lptA and murA.

78. The composition of claim 74, wherein the expression of the Cas and the at least one crRNA or guide RNA is under control of the E. coli BolA promoter comprising the nucleotide sequence set forth in SEQ ID NO: 13 and the E. coli J23100 promoter comprising the nucleotide sequence set forth in SEQ ID NO: 14.

79. A method of treating or preventing an infection by E. coli cells in a human or animal subject, comprising administering the composition of claim 61 to the subject, wherein the first type of transduction particle contacts the E. coli cells and introduce therein the nucleic acid, and wherein the Cas is expressed in the E. coli cells and cuts genomic DNA of the E. coli cells; thereby killing the E. coli cells or reducing growth or proliferation of the E. coli cells in the subject.

80. A method for modifying the genomes of E. coli cells, the method comprising contacting the E. coli cells with the composition of claim 61, wherein nucleic acid encoding the Cas is introduced into the E. coli cells thereby modifying the genomes of the E. coli cells.

The application's sequence listing, which the Patent Office published only in electronic form, follows.

SEQUENCE LISTING (20 sequences)

SEQ ID NO: 1 - protein, 446 aa, Escherichia coli
MMITLRKLPLAVAVAAGVMSAQAMAVDFHGYARSGIGWTGSGGEQQCFQTTGAQSKYRLGNECETYAELKLGQEVWKEGDKSFYFDTNVAYSVAQQNDWEATDPAFREANVQGKNLIEWLPGSTIWAGKRFYQRHDVHMIDFYYWDISGPGAGLENIDVGFGKLSLAATRSSEAGGSSSFASNNIYDYTNETANDVFDVRLAQMEINPGGTLELGVDYGRANLRDNYRLVDGASKDGWLFTAEHTQSVLKGFNKFVVQYATDSMTSQGKGLSQGSGVAFDNEKFAYNINNNGHMLRILDHGAISMGDNWDMMYVGMYQDINWDNDNGTKWWTVGIRPMYKWTPIMSTVMEIGYDNVESQRTGDKNNQYKITLAQQWQAGDSIWSRPAIRVFATYAKWDEKWGYDYNGDSKVNPNYGKAVPADFNGGSFGRGDSDEWTFGAQMEIWW

SEQ ID NO: 2 - protein, 294 aa, Escherichia coli
MKKTLLAAGAVLALSSSFTVNAAENDKPQYLSDWWHQSVNVVGSYHTRFGPQIRNDTYLEYEAFAKKDWFDFYGYADAPVFFGGNSDAKGIWNHGSPLFMEIEPRFSIDKLTNTDLSFGPFKEWYFANNYIYDMGRNKDGRQSTWYMGLGTDIDTGLPMSLSMNVYAKYQWQNYGAANENEWDGYRFKIKYFVPITDLWGGQLSYIGFTNFDWGSDLGDDSGNAINGIKTRTNNSIASSHILALNYDHWHYSVVARYWHDGGQWNDDAELNFGNGNFNVRSTGWGGYLVVGYNF

SEQ ID NO: 3 - DNA, 1341 bp, Escherichia coli
  source 1..1341: mol_type = genomic DNA
atgatgattactctgcgcaaacttcctctggcggttgccgtcgcagcgggcgtaatgtctgctcaggcaatggctgttgatttccacggctatgcacgttccggtattggctggacaggtagcggcggtgaacaacagtgtttccagactaccggtgctcaaagtaaataccgtcttggcaacgaatgtgaaacttatgctgaattaaaattgggtcaggaagtgtggaaagagggcgataagagcttctatttcgacactaacgtggcctattccgtcgcgcaacagaatgactgggaagctaccgatccggccttccgtgaagcaaacgtgcagggtaaaaacctgatcgaatggctgccaggttccaccatctgggcaggtaagcgcttctaccaacgtcatgacgttcatatgatcgacttctactactgggatatttctggtcctggtgccggtctggaaaacatcgatgttggcttcggtaaactctctctggcagcaacccgctcctctgaagctggtggttcttcctcttttgccagcaacaatatttatgactataccaacgaaaccgcgaacgacgttttcgatgtgcgtttagcgcagatggaaatcaacccgggcggcacattagaactgggtgtcgactacggtcgtgccaacctgcgtgataactatcgtctggttgatggcgcatcgaaagacggctggttattcactgctgaacatactcagagtgtcctgaagggctttaacaagtttgttgttcagtacgctactgactcgatgacctcgcagggtaaaggtctgtcgcagggttctggcgtcgcgtttgataacgaaaaatttgcctacaatatcaacaacaacggtcacatgctgcgtatcctcgaccacggtgcgatctccatgggcgacaactgggacatgatgtacgtgggtatgtaccaggatatcaactgggataacgacaacggcaccaagtggtggaccgttggtattcgcccgatgtacaagtggacgccaatcatgagcaccgtgatggaaatcggctacgacaacgtcgaatcccagcgcaccggcgacaagaacaatcagtacaaaattaccctcgcacaacaatggcaggctggcgacagcatctggtcacgcccggctattcgtgtcttcgcaacctacgccaagtgggatgagaaatggggttatgactacaacggcgatagcaaggttaacccgaactacggcaaagccgttcctgctgatttcaacggcggcagcttcggtcgtggcgacagcgacgagtggaccttcggtgcccagatggaaatctggtggtaa

SEQ ID NO: 4 - DNA, 885 bp, Escherichia coli
  source 1..885: mol_type = genomic DNA
atgaaaaaaacattactggcagccggtgcggtactggcgctctcttcgtcttttactgtcaacgcagctgaaaacgacaaaccgcagtatctttccgactggtggcaccagagcgttaacgttgtcggaagctatcacacccgtttcggaccgcagatccgcaacgatacctaccttgagtacgaagcattcgctaaaaaagactggttcgacttctatggttatgcggatgcgccggtattcttcggcggtaactccgatgcaaaaggtatctggaaccacggttctccgctgtttatggaaatcgaaccacgtttctccatcgacaagctgaccaatactgaccttagcttcggtccgttcaaagagtggtacttcgcgaacaactacatttacgacatgggtcgtaataaagatggtcgccagagcacctggtacatgggtctgggtaccgatatcgacactggcctgccgatgagcctgtccatgaacgtctatgcgaaataccagtggcagaactatggcgcagcgaacgaaaacgagtgggacggttaccgtttcaaaattaaatactttgtgccgattaccgatctgtggggcggtcagctgagctacatcggcttcaccaacttcgactggggttccgatttaggggatgacagcggtaacgcaatcaacggtattaagacccgtactaataactctatcgcttccagccatattctggctctgaactacgatcactggcactactctgtcgtagctcgttactggcacgacggtggtcagtggaacgacgatgcagaactgaacttcggcaacggcaacttcaacgttcgctctaccggctggggtggttacctggtagtaggttacaacttctga

SEQ ID NO: 5 - DNA, 168903 bp, Enterobacteria phage T4
  source 1..168903: mol_type = genomic DNA
aattttccttattaggccgcaagggccttcatagttttagcgatttgggaaacttcatcatcacttaaagagttgcgataaccgatgaagtcggaaacaatacggaatttcttggtaaactcagcaaccattttatcactgttttttgaagcattatttgataatacatcaaaaagattagttactgtccaaatgtcatgaccgatggtatcttttccaccattaaaatatacaccctgtaatgaactaaccatattagcgagtcgtgtatattcttcagaaacttcatctatactgaagtacttcatcataaaatctaactcaggatacttgataattttatcaatatatcgtttagctgaacttgaataacctacatacttatcataatctacatcatcaaaagcatctacatataaatcacgcaaagcttcaaaaatacattggcactgaccgagttcttttacctttttctgtaaaagcggacgaataacataaaattcattaatgccaataagattagccatacgaatcaaaatattcatagatggatgacaaagagatgtagtaccatccatagagaaaatatcagaacgatgcatatacgctacataaccagtaatttcatctgcttctgatgtgaggcgtaaataattcctcttttcccagcgcccgtctttaatttcaaacttaaacgctgtagcagctttaggacgaggagctttacttttaactacctttggaatataactttttactaaagcttcaatttctgacaaataatgaatgttaacttcatcactttcaaacatcgccataatatcaggaagcaaatcaatctgcgattctacttctggattaataaacagaagacgttcgttatgatgaatattcaaagtgttattaaattcactatcatctaacgcacgtgctaatccacggacaatattaacacgatttttaatattatcaataacgatattaatttttgttgtattaataccaaacagacgataacttgatgcaacggctgaagtttcatgactttgcttaatgcgcttcagtcgagggtcaagatttacttcatacacaactcccgcgttgcataacttactgtcaggttcaaacatgctctgcatctttttatatgacagatttttagtcgtgaatttgactgaattactaatcatataatctcgagcagaataccccatcttcatcaattcacgatatgtgtgacgaggagatgtagattctttaaatcgttttacatcttcattaaatgctttctcactgagttctttaactcgttcaataatatttttacgagtgcgatcatccagtgaaagagcctcgcgagatggagcaatatcaagtgaacccattggaaacttaatgtaattcacttcattgcgaatgcttagccagttacggtctctaataacaccatcgataggataaacaataccaccgtagatagcatataatccaccacgatcaggccagtatctttctggatttacaccgtaatagtcatcaaaatccggaaaataatcaatttcgcggtcaagaccattaatgatagccaaatctttgaacggtcgcatgatataagaaacttcataagcaaagtttctaaagtctttttcttcaactggaactacgatttcaataccagttttatcatctggacccatttcttttacgaatgtaggtttaatctgtggaccatcaccatccatgtaagctacataaccacgaatttcacctttatgatacgaagtaatactaaacgtatcagtataactaaacggagatttagaacctaaaccaaatccgccaataaagtcattagattcagctttagatgaactgaagtatgaattatacaacccaggagaattatcatcaccttgaatatcaaaatcactcatacccggaccaaaatctcgacaaacaaatcgtgggtctaaacgtccaggaacttgtatgataaatttttcaggatttccattaagtgcatgagcatcaatcatgttagtaatcaattcacggactactgcgcgaatcttgtttgtatacaaatcagatgacagaattttaaatactttaggagatgctgtgatgctaaatgcttttgatttagaaccattaccaagaattgtttctttttcagtggtgataatcataatttcctcattaattcatattacgcttaataacttcagcaacttctagtagttcatctttagttgcggtgtcggattgaattttatctctaatatctttaaagcgggttttaaattcttcggcttctcccatatcgaaaaagcgttgaatgattctatattctcgatgaactgctttatcaaaaagttctaaatttactttatatgatttcatttcaatatcctcatttgcccaattaattataccacatccttgtggtaaagtaaactactggctcatccattctttacgaaggtcagcattatctcccatgagcatttcaaaaagctctttccagttctcaggaagtttaacaacatcatatactgggttttgaatcatctcacgatattcagatttttccaaagagccaagtcccttaatataacggatgctatgtttaggtagagcatctttggcactctcatattcagcgactgtataaaaccattcttgttttttaccgacctgagcgatgattacaggagttttgacaaagcgaattcgtccttgctcaaacaattctggccaattactaaaaaatccgagcagagaaggataaatagaacctaatccaataatctcttaattatgaggtatttctatagatagcccgaaggctatccatcgtgatctgcgtctgtcataatagcgacattcgcatagttcattgaagaggatttaatagaacgacgaacattgttctgcaatttatattttttcatatcaacgctagaagaatcaatttttacaaatttcattatacacctcatagaacttttcatcaggaatccaaccgcgtttaaattcattaaatgctcggccgaataattttgaattcacagttatattattaactgatttccatttagcaactcccgttcgtttataatgatcggggtcatatttcgtgacgtaccattcatataaatttggtattaattttacagcctctggatttgtcgctgatttattataccatggtttcgctttttcaagttcagctgcttttgcagtagcagcaacagtatttccaacaccaactaatttttcagttttaatgcgtggatcattaacatgaagacgaaaaacttcgcccttttcatttttaaagcatgtcatgcctttaattccaggaagcttaacacctttattaacaccgcatcattcctttgggttaaatgatcctttaattaataaggcgcatttacccgatttaactacttctcattcaacaactttatctttcataacgttttttgaccattcagatactgctctttgatggctaaattctagcaatttcactataatttgcactagaacgtaaactatttttcagtgtttcaacattctattcatcgcatatgccatttcacgattacgatgaattttatatagtagaaaatagtgctaaaaagtgttcacgaaaagtcatgtttcaccaaattttcgttatcatcagaacctcccattgatcttggaaggatatgatgaatttcacccttaaatttagaaacgcgggttttaccccgcactattaagtcattatagattttttcgtaattcacctactgttatccatttaccattaatctgtacttcatcattttcatttacgataattgtatcgccatttagctcgaaagtaaaccactcgccatcttctttttcttcaaacgctttttcaccgagaactagaccagtgattgcgcaaatatcaaatagttctttgtttttaagcatatctgcataagacataccccaactgttgagaactttaccacgcaatggataaccaccgtgaagttctttatcacgaacatcaataagatatccgatagccgaatcaccctcagtcaagaaaagagtagtatcagcatctttaccgcaaagattcgctttgatatgtttatgaaccttagctttagaagcctttttagctgctttagtttctgctgctttttctgccgccaatttacgagccaaagcagcttcaataatcggcattagaattgcttcattatttagaatatcacgtgaaatctttttagcatcaagttgaatatgactacgaatttcgccaaatggagaagtcaaacgctctttagtttgacgaatcaatcgcatgtttttcatatcacgaacaaacataacgatagtcaaacattctttgacacgtgctttagtcacatcaattttgaacttacgtttgatttgtggaataaggtcttcacaaatatcatccatagcgcagtcaatgtgatggccaccattcttagtatgaatgttattgacgtatgttaattgacgaaaaccatccggtgaacgaccaaccgcaatagaacaattttcttgctcttgaacaatagcatgttcatcatactgccgtgcatatttcttaaaattgccctgaacctttttaccattaaaggtaaattgaatatcaggataaactacagcaagtgtctggagacgatccagtgtaatgtcaagataaacttgggacagctcattagtttcaaatgacataaaatcaggaatgaaagtaacacgagttcctttccattttccaggaatatcttcccatgatttattttccatgccatttgaacaacgaactacaatattattttgaccgtcgccagtttcaccgacaaacatcacagaaaaaatgtttgtcaaactagaaccaacaccgttcataccgccggtgacgcgttctttatcatcaccaaagttaccacctgcttttggaatagtccatgcggcaacaggaccaggaatttcttcaccggtaggtgttttaaccatcgcttgtggaataccgcgaccgttatcttcaactgttacttgattgtttttaatagtaacattaattttattcgcgaatttaaacttagtacgaataccttcatctactgagttatcgataatttcatcaataagcttaacaagaccaggtacatactgaacactttcccatttaccaaacataaagcgctcatgcgtttcattagcagaagagccaatgtacatgccactacgctttttgatatgttcaatatcgctcagaattttaatttcattcttaatcatcacttatcctcgtttggtttcgggaatattatactccggtaatcataaagctaaaggcccgaaggccttttatttaaaacgaatagttgaatccttaaagaacagcccagaacatactgttccttctactttctgcccggtaggtccaatagcacgaaatccagtatgctggaaatcattttcagagcaaccgaaccaattatatccagtgatttcaatattagtaaaaccacttgaagacaaaactttggttgcattaatcagcatcagtactattaattaaagacactgctaatactaatgctgcaattgaacgactaatatatttcataactaccctttaagcaagtcgtaaaatccattattcccatgcttaggaagcggaaactaaccgaacagccagccgatgacaatcaggacatacaccagtatctcttccagaaattttcttgattttttcgtattcttttgcacagtctttggattgacatttataatcataaagcggcataattattccttaaagtaagctttcaacatctgatataaagaccacgcctgatcattattttcaatagtaactttcatgactgggaattctgtgaaatcttctatttgttcttgctctttctcttcctgctcttgctcttcaaccgcctgatatggattttccacttcatcaaagaacccagcttcgttagtagagagccagataaagttttcgtcaaggatatcaccgccggcacaacgtttgagtacacctatggatgtcataattttagtaggacgcccaagataatcagcatctaaaattttaaaaggctccatacctaaacgtcgtgcatagattccgttatcagtatggtctttaataaaattttcttgagcttgtttatttttaaattgataccatttattaacttcaaatttaatagccattaataaatttccttccagtaagttgtgccgtcttcagtaatttcacgaaatacaccataaattggctgtttatcaccgactttctcatacacataaacagaagtcaagtgagtaaacttgctagtatgttccttttgaactactaccaaatttggatcaaataatacatcttcaaattcatcattagtgcaattctgaacaattttacgtttcattacaatttcctcattaattgaacagtggagcgatacgtttcagaagagtatcaacacctttagcgaattttccattttattctccaagttgttttctgtatcagtagttgatattgatatagtaccataatcaactactgatgtatatagttttatgaaaaatttaaactttatgcatagagagcattgctatagtgtttaatccaactttcaggaatgactttgtatgttcctaaaaataccacgttgtacaacttaacaccatcttctacccattgatcggtaatgtatccacacatagcgcgagtataaacaacccttccatcatctttaataaagttaaattcacaaggagcaatgaacttgatagcctgaccgagtttccacttaaagtctacacctacatgcgaagtatcaatcgtttcaattcctttagcaggaacagcttttaaaaacgcagactcaagaaatttcgcacgaacatagccaaactggggtttagactttccatctttaggaatgatacgcacttttacttcagaatcttcatctttaacaccatgcttaagctgaatgcttacaacttcgaccaattttcctgctgctttagaacgggatttatcagatacacgagctaattcaccaatattaataatcatagttatctctcacttgttaaaaagattttatactccacgggaccattatactctggtcccaagagtttgtaaactattaattcaaaatagctaccactgcactacgaggaactacggagtactctccagcatgaactacgttcagaagttcaacgccatcttccaatccattggtcagttacccaaccaccaatcggattcgcaaatggacgacgaatgtaaactgccttacacaacaaatcagtcgggtcttcaggtttttcaatttctgtcaatagattaaaatcttcttcatagatgatgaatgatgatacccttccataatagtttctaatttccatgtacactgtaccaatgagaattccactattaacactaatgacagtaaaaggatatccgccagttgtaccaagaagttcccaaaatttgctatcagtcgtattcgacattgtctgaaaatcaatttcagatggttttttcatttgatacgcagtattaattttaatcataattttctctttagtttaaggtaataaagccttttagttcggcataggatttacggaacattacttgatgcccgccaatgataacttggtcatctggtacttcgtatacagcaagataaaatcctttcgaagctaattcttcacgctcttctcgtgtgaaccatttcatcatatcatattcgctagcaaaagcaaaatgataaagagctacaaaccatccgggaatatgatattctactccaacataatctttcttgaacttagtattaattacgatattagcatttttaactaatagtttgtcttcgtgcggcacaggaattcttttattatcattactatgatgcataaaattaggtctgtcataacctacatgtaataaccactcttcactccatgaatctattatacttctatacggcgttatttgaacacaaagatctcggcgtattgttatagcgtcttcataattaagaatactaaacgatgattcaacacgataaattttcattttattatcctcagtagctatggtgttatagtaccacaactaaccgaggaagtaaacaactttttatcgttttgttggaagagatagaggatcgcattcttcctctgatggagcatcttcaagacccatagcatatcgcaaagcatacttcatcatcaggatgtctttcgcacagtcatgaatagaatcatgtgcaacgaatccatctaaagttccctttggaagaggacacgttgtcatatcacgaacaagcagaagtgcttcaattctagtacgaatatcacgctgattccaaaatttacaaggttctaacttaaatgtatcaagctcattctcggaaacgccgttaagacgttgaatatcgcgaataagatcgactaaaattggaaaatcaaacgacattccacggcaccagccttgagatttccaaggatcgatattatgtgcattgatgtaatcattaaattttgcaataccgtcgatagtgcttacatcttcatcggatggtgcaatattttttcgagcttcaggagattgattcttccaccattcgatagtacttttagtaaaaagacggtgtcctttttggctttttaaatcaaatttgattttaatgccacgtgaaactaattcatcgaatgtttcaactacttctggattagggtcaaaagcaattacagccaaatcaataaccgctgctttttcaccacttcccattgtttcaaaatctataataaaatcaaacattaaattttcctcgctaaatcacgaatttgacctacagtatagtcttgaatataaactttattaataggctcatcaataaattttgccatagattcaatatctttttgtatttcttcaagactgtatactatctttgaagctttttcgcgaatagtgatattttcaggacccggattttcttgaatgacaactttaacatttgtcataagagatttaaactggtaccaacttaattcaatcattaataatcgcctcataaagatagctaatttcgcctaaaacataatcattgattgtaacagttttaacttcaccgcaaaagaattctaacgcaattaaatctcgttcaatttcttctaattgaagcatcaacttactagattcaatttttacagtttcacgatttttgctataagctatttcataaatttcgcttactttatcttgaagaagataaaactgatctttagttatttccacgaatagcttcctcaaatttaatcatacataaaacacatcataacgaccacgggtgacaccaacataaagaagttgttgagctaattcaacatctgcataatgaatacaaggcgtataaatgaaagcacggtctacagacataccctgcgctttatggaatgttgatgcaggaagtgctttcactttactaaactgtgatttagcatcccaaaaatcactccacggagcttttccgcctttgttccaatttttataagtttctgctgttttagctaaaaataggttaaacttatacaattcttcgtcagatgaaattattttaatcttttcacgataatattcatcatcgccataagtttctactgttaaatcccaatgacgaattagatattctccaggaacaccacgggctttaacaaacgttgatgtatactctgcttctataatacgaactaattgtccgttattaaaaataatttctgacacaggctttccatcaattttatatgttttaaataatggttcctgcattacaataatttcaccgacaataaaatctttatcagtttcaaaaatctttttacgaataatgctatttaacttgtcaacagatttattcgtaaatgccattacgcgattttcaaacaaatcatctagtgatttgacgattgaaaaataatttaccataaaatcgcgtaaagcggtatcaccagtaaatccacgtactccatgcccgtcaacaactttatcataattccacttaccgttgcgaacgtcagtagctacatcaataataggagcattactgcgtttaacttcagtgagttcacactgataaaaatctttatgtgtaaagaatggactgatataagcagtattttctcctggttcaacaggtctgatttgcttattatcccctattccaattatagtacaccaaggtggaatagttgaaagcagaattttaaatagctttctatcatacattgacacttcgtcgcagattaatactctgcatttggctaaatcaggtacttctttttgttcaaaaagaacattttcttcatatgttactgggttaattttaagaatactatgaatagtactcgcttctttccctgatagttttgaaagaatctttttagctgcatgtgtaggagctgctaaaataataccagttccacccgtagatattaaagcttcaatgatgaacttagtaagagtagtcttaccggtaccagcaggtccattaatagttacatgatgtttcttttctttaatagccttcataacaatgttaaaggcatttttctggccttcggtcaaatcatcaaatgtcatcgtaaattccctgcaattggtatactaacaatacgcccagtatctaaaattcgctgatataatctttgcgtgtctacgtcaggcttaacatgtttaacttctattttattaaaccaaaatttacgtggagtctcaactaatcttggaattcccttacctaaagctaatcgatactgctctttaagagtggtaaatactttatcagcaatcttccattcaaaaaatacagcaggacgatgttcatcaagcggaactggcgctgtaaatccgtctttgtctcggtaaactatcgcatatacataaaccatattatcctcggataagtttaaaaattgaacaatttagcggatatcctcttttcagtttaagtttatcaataaaagacaaattttgataccgctctacaccttgaataattttatcacacatatcatattgcatttctgcttctgacaactttttcacaattttccaatccgagcctttaagaagaacgttcaatttaacaacttcagcgccttctgctatgcgagaaccatcaatacgtgctttaagtgctataattctcagcttaatgtcagaggtctgttttgatttagaaagctgagaaatgtgttcaattcgattttcacgttttttctgtatagctttaatttgattataagtctttttgattttagcccatttcttttcatctaaatttagtttatgaacttttttcgcagatgaacgaccaattcgcaaagcaaataaatcacgcttttcaatcaactcttctaaagtataatcagaacgaaatgtattatactttttctttactgcaataacattccctttaatgtatccaacgttattatcaaaacgttctaatgataatttctctccttcaatacgattatcaaaaggttctcccgagtaagcacaaactttttgatctaaaatgttcttaatgtaattgaagtctaagttaaaatctttagaacgtctttttgcagatgcctgagtatgctctaaacgacgtttaattttacgaatttggttattagacagcttcatatttttctcacatcttacggacggttaactacttatactataacatttttactttaacttgtaaacaactttatgaaaaatgctttaaaactttcatggtataatgaatctaagtccttccattatagattaaatccttcaaaatcaagagtatagatagtgtatgttgaacactttttatactcatatctatctgcaattctaaatacacttccagctggtatcattacttcttgttcatctgaaactaattccatattacgataacgatgactatccggaaacttaaagtttggattgtattctttacagcgtagagcttttatagcatactcctggaaattgaataccataggagctttgaattcaaaaataacttgtgtgttatactctaaaccagaagcaaaatgtagagctatatttttatcatatgaagctgatacgactttatcaaatgtaataatatcaattccttgatttaatacttgtttagtctcagctggaacacctctccaaagaggtttatcgtttggaaccaaacgagatttgattatttcatttaaccaagaatggtcatctggtttattagtaatacaatgaattaaaagttcaatttcagataaattaaacccttcagaaagtaattcttcacgaatagaagcacgcaccgatgcatccattgattttattttaaaatcttttagttgcattactgagtatttcattcaactacctcaatatcataaactttaaatgttccaaatgaatcgtgtaatttttcttttgaaatagaagttattttatactttccaattggaatcatccattcttgttcacgcacaatcatcattaagttatcagtacgctctgaatctaatccatcagtatcttcatacgtgtacttaaactcagtattaggagaagaaagtataatatcgctgatatggtcagaataattaaaagctttatcagtttttaaacgaagtattgtttcagtgaaatattcagcataagaaaaagaacacgctgtatgcaaactagtagtaaatgaatctaccctgttcgttgaaaacacttctccaacttgtaaatctttaatgagttcttttgtcgattttgatataccacgatataattgataaggcgatttagttaaatgctttttaatgatttcatttaaatgcttatgaagagcttcattctttttggcttccatacattgccaaagaacagactgctcaaagtcagtaaatttttcacagacctttttatacatatcatattgaaaatcaacgctttcagcttttatagataactgttcaacatctgcaagattaataatcatgatagcctccgtatacttcagaagctatcatatcatcgttagaaaggaaagtaaacaactttttgaattattttgcccagggagcccaaggcggagggtcaagatggtatgaagctagttcttctagaagagcatctggggcttcaattccataattctgtaatactatacggtactctttcttataatcactagaatcattctggttattcgtagaatgattatcttctaacatctcaaataaatccatattaattcctagcgataaaaaccaaatttacgattagtttcaatgatctttctttcttcttcggacattctccagcgtagtccaacatcaaaatgagcccagaccatcctaacaaatgcatttatatctttaatatcttcaataatgaatgttttacttttagaaggttgactcgctaatttaactttatcgtcttcaaacatgtcaaaaagaccatattcatgagctcttttatagcctttaatagttaaagcttcagaagaagaaaatggtgaatctgtattctgcaaaatatcttcagtatgctttataattagaataatattttctggatattttctttcttttatatctttaattaaaaaatccggattttctgctaaaggaataattaatgagcaatttttatcaagtgtatttactgatttaccttctttagacataaattctattgaatataattttgctacttcaatcatgtgatttccttttgcctactaatggaccgtcaggaattttattttcctggatatatttctcattttcttccatcattttactgccaattttaagaagcaaatccattgcttcatttgcttttgctttagcttcttctaacgtcatatctttgttcatgatttatcaccatagatgtctctcatcaatttaagcgctgagcgttctagtttcttttctttctcagcactaatcattgatttcatccattcttctgattcattctgcatttctttatttgcttgttcaacccaaccgtcatcaatatacattgagtttggtctattgaaccattcaagcatcttcttcagaactttcattcgttttacctaaaacaatagtaggagcatcgtcaaatttatgaatttttagcaaatttggatttaaattattccataaagaggtaataaaatatgatagcgcactttcgtccgtaattataaatttatttcctttatctattttccaatcatatattgaatcatatgaatagaaggataacggtttattattataatatgcttcagcaacatcaatatagttagatttagtaaatgcttgaattgccataaatggagaattttgtacagtttcaataattccgatctttttaagttttatttcaacatcttctggaattggcattgaaataaaatcttctactagatacatattattgtcatatcttttatcaatcattactgctacagtaattggaacatccttgacaaacgccatactaatactattgatagacatttcaaacaaaattgcttccataattttcctcaatcacaagatgtagatgaacaactagaatcacaagaacttccacatgaatcacctgcccatacatgaacaggaacattagtatcatatgaatcagaactagactgtgtattctgtgtgttagatgatgtagtaggtgttgaccagcgccaaggatttttataatattcttgggcttcttcataagtcatagtaactgcttctactgttccatctcccatataaacatattcaactacagttaaaggaaggtagtcatttgaaataggaactacaccttccccaggagttgtagagaaaaaatccgtaaagaaacttttaaaccaattaaagataaacattacaaaaagcctcttttgaattcgacttgcttctcaccataatcatatcgaatctctacattaaattcgacagaaccatctgcgtacatcataaatgaatgcacaacaacttctgtagaccatggttgtagttcatatttcttcattacatgtcgtgaaatgataatatctaaatcttcatttggtttaatccaacgatttaacatagtactctcctctataagataattctattataccatactcattttggaaagtaaaccatttaaatgaaaaaaggactcccgaaggagtccttgagttattaaccagttactttccacaaatcttcatttgcagcaatccattcagtacgttgattttcttcatatactgtagaatatgctgctttttctgaagggaatgtctggtaatgagcgccagaaattttgtgaacgtcagaataaagagggaaagctacagaaatttcctttccttcaattttcttatttccatctaatttctgctcaaatgttttgatattaacataaccgcgagtactagccatgtaattctcctttatttaaattacatgattatttatacatcttcttttctgaataagtaaattaaattcttaagagccgaacttgttacatcatattttcctttaagcgcctttacaaccgggcctgttgctggtttacctaaagaaacccataactcgtgtatttcgcttttaagtggttcatgccaatgcggtgcttttctttgcgcccttgaagttccttctgaaatctttttatttccgccattcgaataaaactttttcattacttcagattgccgagcttttctttctgccctattttgggctatacgttgtgaattcttcatccgagtttttgtttcaggattgtttaatctaagtttatgttctaatcgttgttgctcagtccattttcttccttctccaccctgaccaccaggagaaatattaatgcaagtatctgggtgtttacgttttaatgcagatattagctcacgttcaacttcatatgatttttctctagaaccatggcattttgaccatcgtattttataattaaatccatacttacgatatatgttccatagtattttacctgaacccggatatttatcattatatggatttacaataaatgattcatgtttcccagcgtaccaaaagacgcctttcggcgtcctaacttttactatatatgttctataaaatttttgtttaatatccattatcttgacgttcaaaattatgtttgttcttcagataataaagtttaaagatttcttccgcattcattccaaggccaacaaacatatttaatacgaaatgaaatatatccacaagctcaaatttaatttcgagctggtcttcgggggacatttcatcaatgcgtttttcttgcgcttcaatataacgtgctttccattttttccatacagcagaagcttctttttcaccacgtgacatttcaccaagagaagtcagaagttcgcggaattcatcatcaatacagtctttttgttcacgcatccaagaaacaacatcaccggcagtttctaatttatctggatgatagcagtattcgcggacattagccaaacgaatctgtaaaaaccgctgcatatcaagcataacttgcagcggatctttttcatcaccgagaatatcccagtattcattttgagctttatcaacaccttcgatcaaatgagcacattcattaaagtgagccattagttttcctttcaattcattaataagttaaataattatatcatttgagtatgtaagcaattaattaaaaatatatacttcatcagttccattcttttctttggaatgatatatgttaaagacgtattttttattaagatgctttacattatattttttagaccattctttaagaagagtgttttcctttccgtggtgttctaaaacattcgactgcccaaattttattcctctatcatttaaagaatctaaaagatttaaaaggtctttttcttcatcttctgaccaaaatttattataatcagcaactgttatgagatacggaggatctacatatacaaaatcgccgtctaaaattttaacatctttaaaatgcaatgaactaaagattattttatcacaattttgtttaaagtgattatattgtttttcactatttttgtttatagttctttttccaaacggagtagtaaaatttcctttatcgtttatacgaatcatattactaaatccgtgaaaatgaagaacataaagtaaaagaggatctctagttttattataatcttcacgtaatttcaaaaactcttcttttgatgtttttgatagtttgtattgctttattacttttaaaacgtcatcccatgatacattaataagacgcttatacatttcaataattggttcttgaatatcattggccaatacagggccattaacattcaaagacactgataaacctccacaaaataaatccacgaatctgttatattttggaaagtgagatttgagttcaggtaataatgattgtttattacctgtatacgcgatagctcctagcattatattctctcatttattgcagcaaaaatgaattatacaattcttcatcatatgtatttgatagtaatactaacacgttttgcgataaatattaatttaaaggaggatatatatggtacaaaaattaatggcacttgttaatgccataaaaggtaataagaaacgtatagcttttactatttctactatggtaggaattttactctggaactttattttatcacctgttgcaattgcacatggtgttaatattccagtagttactcttgatacattcgtagatttagcatttgctttagttgggttaatttaaatcttagcatatttagatagccgcattttagccattaacccctgggcaatattatttttcatatattccataatttgttcaggggttgcaccttcctttctaatcatatcattaacatcttttgatttccagggagatttatcccaaaacataaccctttctcctgcatcaactaatttagtcattcgtttaatagtgtcagggtgacgaggttcattatctaagacccacacacgtctatctttaaatggaacaacttctaggtctaattgaccgcccgtaatagctataccattttcaataaaaagtgaatctataggtccttctagaacatatacatcaccatctttaactcgttcgactccatagatttttgttgcctcaggataagcttcgatggtgatatatttttgaggagcatctttctttaatgcacgtccttgaaaagactcagcttttccattagcattataaattggaataacaagacgaggctcagaaatttcctttttgtatgttcccggtgctatgctattaactaatttaggccattcggttgtaaaccaaagatatttccatttatcctttggaatacaacgagcttttacgtattttataattggatggtcttccgccagtttatctaatctaacacatgacggaagagatttaattattttcttctcgggttgtttaggaagttctttaggtttttctattggacgacttttacctttttcttttcttatttcaaagatatactcacgatataaatcgggttcaaactcctttaaatatattccgattggtgcatgatagttacagttataacaatgaatatttccttcattattatcaccataataccatccacgggctttattctggtcggtttttgaatctccacaaacagggcatctaaaccgtaatttaaaagttgaactattatttacttgtgtgaatttaggtaaatgagctaatgcacggtatgcaaactcattatcaatccaaggtattgatgacatttttactcttctttttctttagattcctcttttttctttttaggaatctgttcaggacctttatttactacagcgcctgatgttgttccaatagagatattttcaggattaccacctgaatctccagcgaccatatcttctttgataaattctttaaatgttttcatattaacctctattcataaaagcattaaaaatttggtcatcaatagaaacatttactttaggctgtttttcagatggcaattcatatccacatattacaattttatgatcaatatcaaaatacacagaagcaatatgattaatgatattttcagtaaagtctaaatcaacatcaatatctttttgaccaaagcccaaaggataaataatgcgagtaattcgattatctttaacaaagattccaccgacatactctgtgctgcgtttaaagtctacacgccgacgaaatgaaaaatattcaggctctttatgagctcggctcataggacacaacgaataactagaataagagatgtcaaatcctacgccttcaatatgaactaaattgtcatgattaaaccaattataatcatatgccaagtccattagattgtcatatgtgaaaagcaccggattaacatcattggtcacaagcatataattagcaactgctataatttcattatttttaacgaatacaaaccgtgattgatgcgaatggcctggacctgcgttttcacgattaatgatataacactgggcacctttatatttgtacgtgtctttacacttgtgcatttgataaagcattattcacctaccacttcagcgatgatatttttgttattaaagtttttatcgcaatacagaacataattatactgcattacaccaccagacttaagctgtttttgcacttcagctttcatttcaggacgatcacgcttaacgatattcataatatctgcttcaatttgagtttcaacctcagtctgatccgcagtcatagaccattcgcacaaatctttatcataacctgccatagcaggctgagcagcacaagaagctaaagcaaaaattgtagcaaagatgaattttttcatgataatctcctcagtagtttatgtttatatagtatctcaatttccaacaaaagtaaacagttattttaaaatttctgcgtaatcacatgttacaaactgtttctctaacttgacgattttacgaaagtatcttttgcattggcgaatctgcctcttcgtagggcgaacagcaaacttaataaattccactcgaccaaatggagggctttcttctgctggaatatctaacaccaattcccacgtatctgcaataagtgctttgaattgcgtatttttcctgacgttatacggagtaggtttaaataaaacaatatgcatattatcctcggcaatccacttcacatactttcttgtcatcaatgaaagctttaactaatgctttattaacttcagcatattgagtagtagcccattgaacgtcatctttcatcattgtgatttctttagtaaacatgctttcattcttaaaccaccccataaaaactacctttaccaattccataacaatctcctcatttaaccgacaagactactataccatagtcttgtcagcttgtaaactaaaattttaattcattcgccaaagcatctaactgagctcgagtcgattcatttctttgatagcgattctgctcagcctgaatctgttgtgaacctgctacttcgttcacttcagttggagtagaatcttgttcaatttctacccatttttgatttcctttttgaacacccatcaaaaacttattccacttattcttatcaccatatcgtgatttgatttgcttaatgagttgttgttcagcagctgctagctcctcggtttcaatgaccgcaagcataaaatcggctgttgctggaagaccggcagattctgcaatatcgctcatgttaacatcggaagagtcccaagcttgtttaccaacctgtgctgcagtccaaagaacagtttcggtttcaacagccagagcacgtaattcctctgcaatagctttaacagttgtgtaactattttctgaataaactctaatgcggcaagatttacaaatacctagatagtcgacaataatgattgttggaacaaaattcttcttgagcttcaattcgtttaaaagtgatcgaaatgtattagcgtctgctccaccagtaggatactgtttaacgattaaacgaccaagagtagatttctcacgccatttttccatttttcctttatactcagcgtaagaaatatgcccatcatcaatgtcatcaagagaaacatcaagcatattagcgtcaatacgtttagcacagacttcttctgccatttccatggaaatgtaaagaacattatgtccgagctgtaaataatctgccgctaatgaacacaatcctaatgatttaccaacgttaacgccagccattaaaacgttcagtgttccagtttcagctccgcctttcgtaattttgttcagaattctgagtttaaatggaaccttacgagctttattcatataagatagccaacgtgcttcgtagtcatccatccaatcatgaccaacgtaactatcaaatgaaattgataatgcctggcgcatgatgtcaggaatagcaccaacatccggcattttcttatttcgtttttccggaggaagctcagcattagtttgaatttcgattattttagacgtagcattaaacatcgccctttgctgaacatatttttctgtttcttttactaaccagctgtggtcttccggagaatcagccagttttgaaataagtgtttttacaccagaatattctgtttcagtaaatgaactattttctaatgcaacatttaacgcattaatagatggaacgctatggtactcattaacatgagatttaattaatttgaatgtatttttagctggaccactttcaaaatattctgaatccatatatggccaaacttttgaaaaataagcttgatcaaatatgagatgagaaagaataatttctaccacacttactccttaaaagaatttaaattttttctttgaccttttattaaatgcatcttgcagttgcattgtaatacatttttctacatgaggagctaactcagcttttctttcttggtcaagaacagcaaagtccattacaacctttccatcaacccaatccagtttagttacatacactatatgcgtagaaccatcttctagtttaatgacaatctcctggataacattttccatagcagatttaattatcttaagagactcattaaaaagacgttcttttctttcttcttccccctccgaagagggggattcatcgataatttctagatctaaatctaaatcatctttattcattaaattcttccatatcacttagctgttcgaggtcagtttctaaatcagcagctgatttacttttactttctggagatttaaatttttcaacctttgagttaatcaattcatcaacttcagcttcaacaatttcattactatcaatagcacctaactgataagcacgtttaatagcatctcggaatggttgatgcttaaataaaggaccccagaatgtagtgcagttggtatcttttgcacgccaagatttttcttcgcgaatcatctcgccagtttcttcgtcaagaaattcacgagcataccagccatttttaggttttaccacgaatcctaattctagagccatatctaacaatccagaataaggatcgataccaccgtcaaatttaacatcaataaagaatttacttttttctttaacggtacgagatttttctacatttagaacaaattgatacccctgaagatcagaaccatctttaatctggcgtttaccgataatgaatacggtatcagccgaatacatcggtccagtaccacctcccataactgttttactaaacatttcttgtgtttcgtatgtatggttaatagcaatacatggaatatttttagtactaaaatagggagttacgatacgaaataagcttttcattgttttagctctagtcatatcactaacaactttttcatttaaagcatcttcagtttctttcttagaagctaagttaccaagtgaatcgataaaaacgactaccttttcgccgcgttcaattgcatccaattgattaaccatgtcaatacgtaattgctcaagtgattgaaccggagtatgaattactcgttctggatcgactcccatagaccgcaaataagcaggagtaataccaaattcactatcataaaacaaacatactgcatcaggatattgacgcatgtaagatgacaccattgttaatccaaagtttgatttaaatgattttgatggacctgccaaaattaacagaccagattgcataccaccagtaatttcaccagaaagtgcaatattcatcataggaatttttgttcgaactacatctttttcattaaagaatttagatgctgttaattctgcagtcaatttagaagtagaagctttaatcaaacgagattttaaatcagacatataataccttatagtagtgttcttgttccacgaaatacttcgagcattcttgcataagatttatttggaaatccagcttcaattgctaattttttaagcttaatagcaccggattttccagagttttcccatatttctttaatcttttcaatgttatcccacattattgggtcacgtttatgtgatggtttatttctattataaccatatggattattaagcaaagcttcttttcgttttgctttagtttcttctgactgctttttgcctagctgggctttccggcaaacatcactaaatccaagatgttttggttttcctttttgagcttttgaaattttttctttggtttctgatgaaactctataaccaattcttctaccaccctctccaccaatttttaaattataagtcataggatcatttaccacatctattgttactaattctctttcagcatcacgggctgatttaaaatctttataaaacccaagaatgcttaaattaaaatttttcttaccatactttttcttggcttgtgctaataaagttcctgatcccatataaccatcatttaaatcatcggttgaatgagttccatagtaaattttattattaactaaattagttataacataagtataattatatttcttttctttatgtcttttcatgtcattaatcaactgctattcgatgaacttctctcttttctaatcaatataacaaaagaagtcccaaaaagcaaacagacctaaaccgataataagcaataaaggtcctaacatttattccaccggttaaagataaataactttctaataatagttcataatttttataaatcaatagcttttttgaacgcatcttgccattcggctttctttgcacgggttttatttaaaatatcatgttgaatagaaagcatctctttacgcaaaacatcactgtgttttaactcattgactctatcaatgagttcagcacgattatttacataaaaacgagcatcattaataattcgatgtttggtatcaaattcttcgtcaattagcatcactgcatcagatgccattgtttcccagacgcgtaaggtaataaagttgtcattataattcttgtcaccaataattaatgcagcaatagcttgactattcttttcagataccatgttcataggaatttttccagtgaacaccggagctttggtccaaggatatttaggatttttaaactgtttttctcgtgcattgccaaaaaactcaatatttaaaccggtgtcaaataagaattctaccatcttggattcgcgttgaccggaccgaaatgaaccgccataaataacatccaaagttttcttggtaggcttagataattgaaaatcgttcatatgaattttatattgttcaataggaaaatattcaaattcaataacattatcaactttcttatgcgcagccttagcaatgtctaaatttataccttgggaaatcactttaattggtgatttaattaatagctcttcttcagtgtacaaatatgcccatggtctatttttaacatttggccaagactgcgaaaacggcaaacgtatatctgtaaataaataataaattttacttttgtattttgccataaatttttgcgcagataaaattgctaaattaggtttaccgccaaaaaagttaatagaagaattaacaactatcaaacggtcataatcattaacatctacttcatcaaaagatttagtgtaaacaccatttttaagagaaataatgtcgacattaagacccatttcagaaataactttaaaaagataaatagtttcagaagatggaacagttttaaaattaataacattattacccatattaattatagcaattttcatattattccttttatgttaaacgattaagcgtattttcctacataatcttttttcgaaatatgtgtttcgccagttttccaccaatgatcaaccaaataaaaatgacgagaatacacatgtaggcttccaacattccatataatggaacctgctttatactggcgagttgaatcacctgcattcaaatcagatactaatttatctaatacgtatttttgccatgcataatcattacggaatccgaagaccacgtcatttgagcgcatgttaacaaccgcattgattttcttgtcacgaatcaggtattgtactgtattcgtgcacatgaaatctgacataccatctttattatagtcaaactgcatagatggacgagtataaatcatgataccacgtcgagaatcaggattttgaccaagttcagctaaacacatgtcatactgagcatagttatcttctgaccagatagcccaaccataattcgagttaatttcacctttagaagatgctacttgttgccaaatcttcggtgtttcacccggaatatctttaacgaacaagcttttagatttataccattcaagttcacgctgaatgtattcatcattaagagcgccaaaaataaacggttcatctgctacaaatgatgcgccaataatttcaatagttttaacacctgttttatcaactacgaaatctttttcttttaatgcaagccccaaatgaagacggatttcttcaactgtcatagagtcactaatcatttaaacctcaattgatacattcatatttaacttgtaacagtaataaactccaacctaaaataatagttggaatcataagaggaaccgttacactatagtatatacttattataatcatcaagattaaaagcaatgctgctataattttgcttttcattccttctctctgatgataattacctgatttggctgcgcagactttttagtttcacctgcaattgaccaaataaatgtaataaaccaaccaataattgaccagttaaacagtaaagatgcgaaaaagattcctactgtcgattttgacccacgcatcaaggcgataaaccatggaagcatgtatataataatagccaacacgcctgaaactaaaaccataaaaattgaacctgctactaaagtttccatgttttcctcacttaggtcaaattttttacacatgaattataagaattcactacatactccatcggagcgtttttacctgtacgccactggtaattattagcccaatttgcccaaagctcagcgcagtagttttcaattttttcttcgcgtgtaattacatctgaattacgatatgcttgagcagattcatctggacgaatagcttcgtcaaaattcgcctgcatttgttctactgtctgttttggagcttctttataacacttgacattaggattataaaatttgcttgaacagtttacaatttttcctacatcagactgatttactaccggtccttgagctacacaaccagcaagacctaatgcaataaccaaaatagcgattttcatttcattctccaaatccgtatcagtagttgatagttgtatagtaccatggaagaacagtcttgtaaacagttttgtgaaaaaatttttagggaatccaaagggtccagaatcatctctttttcataagtatagatttatattacttgtatgaaaaagggacctggaggtcctagatttattctatcagccaaacaggaagtctaacgaagctttttcttcatagtccatgccagccgattcacacatacccgcaagcggtttaacaaacgatttttggaacaaagttgagtggtcaatccaagatagcacatcagaacgaatttcttttggaagttctgtacccgatggccaagcaatgcacttgtcaccaaatggatttccttcacgtaatggaagaaccattactttatttccatccaaaattggagctacacctaaaccgctaacagctcgacgataagttagcacaccacgaatatggaacgggcatttaaatcctggccaacctttatcatcatatttcgctatatcgttcgcagtttttacttcagcaataactttatagtcaagttgacgatattctttctcgaagttcttgtagtattcttggacagactcttcaccttcctgaagaatacgacgaatactttcttcgagagcttcttgcactgcttttggtgttgaactctgctgagtttccatacccatgatttttagatgcggttcagcaaatcgcttatcttccatatcataaacgttcagagcataacgctttttcgctttccaaaatccaccaacgccctttgaaccaagcggagggcaagaaatagcttcacggtccatatgcatcagatgctcgcggttattcatataatcacataactcacgatatgcaacatcaatcataggttccatctttttcttaccgaactgattcatgaattcaaccaaatcgttctgctctttgaatcggtcaagaccaactttttcaataactttatctacgcaaacatataccgaatcagtatcacctgctgcaatgaaatcttcatcattagttccgcatactttattcagatattcattaattttacgagcaatccactgaataccgacttggccgaaaattgtgatagcagtagcatttcgcaaatcatagtaacggaaatgaatattaccaagagcaccataaagactgttaatgagaattttacggttcagctgatttgtattagcaagtgtagctgctttttcacattcttcaatcagactattgagaacagattcggtgtaattcgatagttcatttaagaaatcatcactgaacttaacatatcgttcaacttctggtttagttgaacaagaccctgcgcctttcataataatctttttaatagcttcggcattcatttcttcagcgaacattttctttttccagtctttacgctggaaaaatactttagcgatttcctttggaatgataccttcttgatgtttatcatacatccatccattcggagaacaagaatattcatcactcggtttaggagctgttcctgcgatatattcatgaattggatgaactttaaactgaccacgaatagtttcaggactaatgttaacctggcgaataatgctcggatacagagacgtcaagtcaaaactcataatgtatcgacgtgcaattggtttaggttcaaacacaaatgcacccggaaaactctgtttaacgtgcgaaccttgttgaggaataaccttatgttcacctttcaatgagttaaaaataatagcatcccaagttttaataggactcattacaccagaaaaaggcattttagcgtaataagacatacttaaaactagatcgataaacccacgaattttatcgattgcttgaactgattctacgtcaatgatgttataactaatgtatcgttgatgattagtctcacgaagtttattaataggaccgtcgtatggtaatttaccttttttggtttcatgttgagcaactgattccaaagagaatgacggcaaattagtaaaagcgaatttcttgtacaaatctaaataatcaagaatagatacgccatcaatagaataaatttctttgctaccgtacatattttgaattagtttagattttacccgaccgattggagagaaacgtttcatactacgttcacccagaatcattttaacacgattcatgatatacggaacgtcaaacccctcaatattccaaccagtaaaaatagcaggtcgtttctgttcccaaagattgatatattccatgagcatatcacgctcattatcgaatggcatataaattactcggtcaagaatttcttgaggaacttcatcaccaccttcacagtcaagcttagcagctaactttgcatcccattttgatactgaaccgtacattgaattcaaaaggtcgaaaacataaaaacgatcgtcaattgaatcgtaatgagtgatagcatcaatttcatattctgctttcattgggtcaggaaatttatcaccagtaacctcaatgtcacagttagctacacgaacaaattttcggtcataaacaatttctgaaccatatgtatcacttatataagcgagtttaaaatcgttcataccgagagcttcgagaccgatgtcttccattcgcttcatccaatctcgagcatctttcattgatggaaatttttgaggagcgcagtttttaccatagatgtctttgtattttgactcttccttacaatgcctaaacatagttggaagatattctacttcacgggtacgttcctttccattttcatcaatataacgttcaacaatgttatttccgactgtttcaatagagatataaaattctttcatagatattccttagtttatagcccgagttattaggctcttgatatattatactccaaataaggggccgaagccccttgcttaattaccaatcgtatatttaggaacgagcttccattcatgtttttgtttaaaagaaataactcggaagttattagttaaatctttcataaaagttctttgaccaggaacgatttcaattagtccccaatcttctaatagccatgcaatcgaatcacgacgaacttcatcttcttctgtcatttcaacttgacgaccatccatacgaagcatttctttaaaatgaacgatatagtatagtccttttttctgaagaatatgacaggactgatatagaactttatctttattattagcaattcccatacgagtcaaagtttcttttactttcagaaaatcttcaggttttttaagagtaatttcaatcattttaccattccaatgctagttttttgagttgtttctgttcttttacgttcttagtcacttctttcaaaaaatcatccgtgactaaaccttttagttcttttaatactaaaggaagttttccatttttagtaagaattgatttatagttaattgcatcatttgtattaacttgataccgcttagcaagtaacttaataatcaatacttcggtggaatcttcaaccagttttgcccatttaccatatcttttaccacgaggaactgcagccattagataattaaaatgagcttcatcacttaagcctgatccaattaaattcatagcatatacagctggcatacactctggaaattgtgataatgcattttcaaccatgaattttgaataatctttttgagcaatagagcatttagttttattattaatagctccaattatttcaaaaaattcattttctgctttttctttaaaagaatcagcagcggattggacagctgtccaatcttttgaataccaagcaacttgatgctcgtttaattgaatatcatctttaaataagctcatatcacttccactgcatttcgcatgctaattgaatgaaaagataagctaaatgcaattcagtattagctgcaataccatgatactgattattttcgccgacaatttcgtacatacgaataatactttgtggagttacacgtgaatagatttcttcggcaagtttacccacgaaccacgaataatcagccgcatattttggtgctaaagctctgagttgtttaacatctttatttttgagagactcaagaacatcatcaatagcaccacgatcgttagtaaccagtgataaaataccagcatccaaaacacctttagacgaataactatcgagctcgccaatagttttacgaaaatcaggaaaattctttttaaccaaagctgctacaactttcatatcagctatagcaattccttcatgcttgcagatttcagtcaatcgacgaatcatctgcttcatcatttcaattttatcttcatcagttggttgaccgaatgtaataactcggcagcgtgactgaagcggtttaataataccatcaatattattagcagtaataataatactacagtttgaactataagcttccataaaggaacgaagatgtcgctgagactctgctaaccctgaacggtcaaattcatcaataacgattactttttgacgaccatcaaatgaagcggcgctggcaaaattagtcaaaggaccacgaacgaaatcaattttacaatctgacccattcacaaacatcatatcagcatttacatcatgacataatgcttttgctacagttgttttacctgttcctggagaaggagaatgaagaataatatgtggaatcttacctttacttgtaatagatttaaaggtttctttatcaaaagcgggaagaatacattcatcgatagtagatggacgatatttctgttcaagaatgtgttctttttcatttacagtaatcataatttcctcattcaagttttagtgtaaattataaaggccgaagccctctattaaaaatcgtgggtagaatcagcttcaagagctaccacataattcgcgtgttcaccttcaaatttagcagcaccttgtttaccttttgcccaaagcagaagtttataatttcctggttgcattttcatatttgccatattgataatgaaattaaatgtattttcaccatcataatcaccaagagtcaaagaatatttaacacgggtcagagcagaatcttctactttattaaaaccgttaattacgattttaccttcttttaccgtgatagcaattgtatcaatttgcagaccacgagatacacgcaacagctgttgaaggtcttcagctttaatttcagtaacagcagatgctaccgggaatggaattggtttattaggagcaactactgtactcggatcggctgctggccaaaaaattgttgagcgggcatcagcaattttaatatttccatcttctgactgggaaatttctgcatcatcattaactaaagacagaataccgagaaaaccgttcaaatcgtaaattgctacatcaaaatcaataacgtcagaaatatttgcttccgcataagttgtaccattaactgcgcgagtcataataaattgaccggatttaagcataataccagagttaatagtagcgaaatttttaagcagagcagtagtatctttagacagtttcatgtaatttccttcaattcaaatgagatttaattttataactaatttaataaagcaattaacgattaaaatcagccgcaattgtttccgcaacaatttgagcagcaacaattagacgttcatctgcattaccgcaataatcatcttcaaggcgttcaccacatgaagtcataataaatttagcaccggcgtttagggattctgtagtatgtttgcgcattagttcaatccatttattacttacttcacgatcgatagcttcataatacgcatgacgagcaggtgcagatttaattttgttctgaataacttccattgcgttatcagaaagagacaaaacccatgctcgacgaattttattttggttttgtggatttgattcagaacgcacgtgttttggctgaatatcttttacatcaacagtataattcacagtaattttagtcataatacacctttagtcataataatcagtaacagtccaagcttcatttctattggacattatttttgtatattctgctttaaatgcattcctaagcatagattcagtaactatatgctcttcattagaaaaattatttctcagaatatatcgttttatttcaggaatagttaatagatgctgtccagttgaatattccatgtttttcctccatagagattatactctaataaattaaagcataatctcttataaattaaaccattacagtaaatcgaccaactttcttcatttgaagatgctgaccatattcttgcgggtcatggtctttatgcgaaattataaaaacgttagtgtttttcattgaatttataatattagctacacctttaataccttcggcatcaaatgacccatcaaacacttcatcaagaattaatgtactaatactaacaccagatacgatagaagcaatatcacgccaagtaaataaaagagcaatatcgattcgtgccttttcaccttcactaaatgaagcataactaaaatcttcacgaccacgggatttaattgtctcattaaattcttcatctaatgtaaacacataatccgcttccattattttaagataatggttaatctgcttattaaataatggaatgtactttttaataatagcacctttaataccagaatctttgagcatatcagtcaaaattcctcggtggtatttttccattactaaattagtttttgtcttaacaattttatcaagttcttcttgaagcagtgctatttcatcagcatggtcaataaactcagaagatgctttttctatagccgctttaacttttttagctttatctactgctgcgatcagagattgctttttattgcgaatatcatttgccaacgactgctgggttttaatattatctcggtattcatcaacaagaacttttaaattatcacgatgtgttgaaagctgttcaaacgaatgtgtgcattcagaaactttatctttaattttagaaacaactttatcaccggaactcaattgtgacaaacaggttggacataatccaccttcgtgatacatattaatgactttattatacgagtcaatttttgatttaattaaaaatgcttcttgaccgattttattaaatgcatcagtcgggtcttcgtccaaaacaatattaactaatctttcgttagcttcttctatttccgattttagcgttctagcttcttttgccaaatcatcatacatattttgtagacgagtaaggttgtcacccgttaattttttctggcgttcaacattatcattatatattttaatttgttggataatactatcttttttaacatcaagcacttggttctgcgaatttaattcacgtattagtgctttattaagcttatccatttcagctaatgttcctacctcaagcaggtcttccacaagctttcttcgcgcaggggtcgacaaacccatgaaaggggtataccctgctgtaccaaggacaacaatctgcttgaaactggcatatgacattccgataagctgttcaaattctgcttggaaatctttactgctggcagattcattaagacgtgtaccgttaacggtgatttcgaaaacgtttggtttttgtcctcttttgatatagtactttttctcatcatattccatccacagttcaactaaaagttctttcttatttgtgctgtttattaattgacctttctttacatcgcgaaatggcttaccaaaaagcccaaatgtgatggcttctagcatagtagacttaccaccgccatttcgtccagtaataagagttttttgaaccttatctaattgaatgtcaatcccattttgaccaactgacattatatttttatattttactctattaagtttaaaattcttcacaaaagattccttttaatgtatcttttagaccattctatcatatcatcataatctaaaaagtattcatcaaattcagccatgcaaacaacgccttgtgctgtttttgatgtgatataaattattccaacatatctagaatcttcttcggtataatcaatatttgctatgaattcatcattaatgtcaaatgtcgaaaacttcacagtatgcatccttaatacaagatacagccatatctcgtaatgatttaggtgtgtcattatctaaaatgttgaagttaaaagatacagcccagtcagtgcagacagtaacctttttaatacaattatcttcaacctctaacggttcaaaccagtattcaataatttctttatgaccaatatcatcttttacttcacatttaaaatgctgactcatcataacatttttaaattcatcaaaagtcattgtgttgcctctacatatagctgatttgcatattgaataagtgcttcacggtcagaatcagtgatgtctggaattgcattaatatactcttccattaatgtctgaagcgattgaacttcaacttcttcactgtcatctgactcgacagagttatcaatctttgacacaactcgtaatgaatgcacaactttttctagttcagattcgaacttcgtcagatttttgtctacttcagttactataacacgtactgatagatttgtaaaatctttatagtcaatttttcctttaaatggataatgaattctacgatgccaggtagtattgtttggaataaattccgttcgttctgtttctgtatcaaacatccagaacccacgagggtcattctcgtcacctgcggttagtgtccatggtgtcccaatatatctgacgtttgcagcctcagaaatagtatggaagtgaccagaccacacttctttataagtcttaaggaaatcgggttcaagaccatgagatttcattcctttataaaaataaaatccattcagttcccagtgaccaacacaaaaagaagcagatgaagttttgatatgctcaagaatttcaccagtattttcttcgcacatccaaggaatcaaatcaatcaaacacccgtcaaaatctactgtagtaggcttatcatacactttaacattaggatatttagccaaaagctcagtagaagcatttggatgcattacatttttatagtggagatcgtgatttcctacaatagtgtgtaatgtaattccagcatcatcaagcgtttgaactatttcacgggcaaactccatagttttatgtgtgatcgcttttcgcacatcaaaaatatcaccgtattgaatccaggtagtaattccatttttcttagaatattctatcgcttgcttaattccatcaatttgaataccgcgaatccactcatcatcagctttaacgcctaaatgccaatcacctaaatttaaaattttcatatatcaagaaccgtcattgaaatgcaaaataaaattattgaaataaatccatctggagtgctaaagaacccaatccaacatgctctagtgaatagataaaatgcaagaaaaagtatcacatatccaagaaatatcattatatcaaactccgtataaagctaaagggccgaagccctttattttgtaataatgtcaaactgttctttaaagcagaagcttgaatcttgatgctgatacaaaaattcatatgctttttctcgctcacggtcataaagagctcggtcagatgacagttctttaatacgttcaaatgttgattccatatcattttcatcaaaccaaatgataccgctatcatgcgaggtcaaaggagtattatcaacacggaattttaaattttcgccagtagatttccaaaataccggaattgttccacatgcaccaagctcgagatgagtatattcgagtgagcgttgtaagtatttctggttaagtttactcaactgatatccaaagccagatttactcattcgttcaagcatttcactattaatataacaatctaggatttgtgccggttgattcggcgcgagattcattttatcaatctcacgattaccgtaatattcatacggaatacctttttccttaattgcaataaaagcaggggaacgttccagaccttccattacagtggatttaccagcaggttttaagaatttttcatgaaaatcaaacatctggtaaaaacctttccatgtagtcgtacgaccaatccaacggttgatattcatgttaatttcagaaacatctttccaataagttgaccgaaccttcacaatatccataggaggctgaaaattatatactgtcggtgcttcttcaatatcatcaaacagagaaacagtttctggataccattctttcatcagaactttattaaaatcaccattatcagaatggctaaaaataacatcagctcgacgaacagtttcttctaatcccaaatttcgacgcaaagaaagaacagaatgatcatgctgataaactacaacacgaatagaaggtttaatattatctaaaagttttttatagttattaatcgtagcttcttgaacggaagtagcaggaacagaattaataattagaatatcacaatcatttactagcttaagtgctttatcgtattctttagctaaaataactggaattgaaaatgatttgtggtcatgagaacttgtacgagtaaatgatttatctttagcataaaccaaagttacttcatgaccatttttaataaaccaatcacgttgctcgagtgagaattttgttacaccacaaccttcaagacctcgagccataaaaatgcaaatacgcatagttttcctcttttcatttaataaatcatgtaaataatattttattttctataaaacgctacgaataggcccaaacatatccataagcaattttgctttttccagatatgcactttttaatattagacatgcatcctttaacggatacagctgcgtctttaattctaggaaatactcgtaataattttccagtagtatcatattgaaatactggcacatttcttttctgagttatcccacgtttagatttagacattttttgtttagttgcattagacatcctagagggctttcctatgttatcagaataataatatttccattgaaatcctccagcggttttccttttaccatctacacattgtttaattgaagttgaacagctatatgacatatcttctgcagcatctgtaatacatctatatttgcgaataaaatttccatttaaatcatattgataaattggttttccagcatttcgtctagcgttagacatgtattttttattatcatcatctttccagaactctttcatgctttccgatattgaagaagatacagctgttttaatccatccatacattttattatttagtcttgttccgtcagaactataacacatcatacgaatagctaaagccaatttaggaagtctataaattttaaataataataaatgcgcggtaaaatgttcttctggtgtcaaaagaactaaattagttttatcatctgtaccacccatacatctaggaattatatgatgtgtttcagtatagtatgtcaaaagacttttatcattgcctctgtttagtcctttttcgatcagtaaattatatatgtttaaataattcattttagtttattttaccaaaaaatttataaagcaatataggagccgaagctcctatccacataatacgccatacagaggctcgttagaacttttaaattttatgcgcttatatgttatagttccttctgctttagctttatcatgagcctctttaaagcgtctcatcatttcctctctagaggaacgaattttattataatctatttcagaagtcggatgttcatctttcacagttgccaccattttttgacttgataagaatcaacccacactttcatattagggtctgctcttacaataggaggattaacttctttgattgaactatcacggtattctttttcagaaattttcacgcaaagatgaccattcaaagattcagtaaatcctgcattaattttaagacgcttgaattttacgtgtgtaagcatcaatcatatcctcaatctgcgatctagtagtcttccaaagaatactgatgagttcatcgttatatggctgttttagaatatcccgacttttcttgatagcatattcgtattgagcaaaattattattttcagctgcgatctgagcgtgcttataaagacgattcagttcgcgtttgtttttagacaataacttatttgcttttctttctgcttcaagacggttcttttcttcaatagaagaaataagcttttccacttcatcattaatttcgggtttatcagtcatattatttctctaatataaaataaaaatcatcatctgttaaatgataccgatagtttaattctacaccattagatttaaaagcggtatcatacggattttctggatcaatatcaatgtcaagagctaaaacttccctgagatacattttaagtaaatagggaatagcttcaacttcaggtatttcttccaagaatccggagaggttaatcgttagcctcatataaaaaatccaaactaggagaatcatctacaacacttttcttttcagcccccggtgttctataggttgattcttcgtaatgcgtcattttatcatagatgtcttgaataaaagtttcatctactaacgcaaccatatcgtcgtcacggctgtcatagacattgtgaacgaagtaactatatttctttgcaacttccttacgttcttttttaatacgttggacgaatgcattaaaacaagcttgagttatatacgcatgtgggtttttatatttcgtttcatcaaaattgtgaagccccttaatagaagcttctataccatctgcaatcatttcttgtttccaagactgggtgtatcctgaaaagttgaaacgtttagataagccttctgcaataagcataatggctaatccgatagtatcattctgacgaactactttatttgggtctttattatttgctaattctgttttccaatcaataatagcttgtaaaagctctttattgtttacgtaattatatttaggcttagtttctgacattttcacctcttagctcaattcatagatctattatatcataatatttgaagacctatcttaaagcatagaggatgaatcaatttcaagcacttcatcagattagccgctccaagagctgcatctagtgaatcaaattggtcaacatattcaattaattcgccgtaattagcgtataaccaccattggctaaattcatactcaaggatgaatccatttccttcaatttgagttaaaccaatgccatttgtatttacttcatacccagcgagacgtaaatcgttaataagagcttcgttcataattataccttagtaattttcaggtctgcaaattttttcttgcgttgatttttcatgcgacgaatagttttatcggaaatttcatgcttttgataagctttagattctacaccaaaagctttaacatcaaattctgacaagatatattgaaccaacaattcacggacagtattgcgtccaatcttctgatcattctgtttcatcgtttgatgaagctctttttcccatttatccaaaatttgaggagttacaatatcgcctttttctagcaaagaaactactttatcatatgcgtaagaattgatggcgtttttaatttgaatagtcatacattatcctcaattacgttaaaattttattatccaaaaaggccgaagcccttaggctaaactttttggcacccttccagccttcgtacatcattgcgactgacaatgacaaagctccttcacatgctgcatacttattattccagaaccaatttagaaaaacttcatcctcaataccgttgtgtttcatgttctggaaaaatttggcgcgttcttcagcaattcgctgcgataatttagattcaggattcatttaaatttcccaattgccattttcatcaataaatttaatccagtcatttactgaccacttggtcgtatcgccttttggagtaacatttaaagtgtatagcccttgcttaaaaagcatgcgtttgatattcatattttcctcagctgtaacgataacactcgtttgatttacgtttagcaactcgttgagaagtattataatcaaaatcatcatcaatgtaaactgattttttcaactttcttacttcaccgcgtaattgacgatttaactcatctttaacttctgaatcaatacctttcattctacgccatttatctgagcgaaaaatgttttcaaccatatctttatgacttaccccatcaggagctttacgctttccgaaatagtcataatcacgcacttttaagtctttacgacgatacgttttacccatggagtttaatttccttagcaactgaactaaatacagcacgatcacaaatcatacgtttatgtaacttgagtataagatagtaaacatcaaaaccatttacataagtaacacgaacaacattaccattcacgagataatactgtccctttttaatctctttatcaaccacaaccatatcaattcctcaaaggtaattcatatgttaataataccacggtttgaacttgttgtaaacaactttgtgaaaaatattttagggaatgataagaaaggaacgatagcttagaatggtaatatacagaatgtgagaaagaaaggcccagagggcccgtcttaatcttctatgatatctctatcatatccaagtgaaatgagagtttctttgaagtgtttaatgttcttttgtctagaatcattaatgaaaatgactggataacgaatgttaagagatgtgaatccagcgcgtttagcaagagatacaatcagcggacgatcatactcaatcttaccattatttgtaagaactttatagaaagtaaaaggagcattgagctcctttagaagttttgtaactgattgacatccaggacaacgacctacttcatctggaattccatagacttcaatcttattttgtttcacaactattccttactaagagcagcattcagcttgttagtaattttatccagacgctcattgaattcactagaagataagcccttttctggagaaatcaaactaatcacgaaaaatatagcaataaaaggaataaggaaaatagctccaactgccataaacagaaagaatgttacagttgtaagaaaatcagctaaacctttacgaaatttatacatttacatttacctttaattgattaaccaagcattgataagcactaaactatactgcgaataaaattctggaccaaaatgaaaatcatatcatttatagtatccataatgtaattcaatttaatcatgtttccacaccccatcggtatttgaccaaagtcgctgattatctgatcctcgccacagctttttggtcggaagatttttctcatacttcccatcaataataacatcaacatatttaagcatttctagttgtttaatatcttcaaacttatatcctgtccacaaccagatatctttctccggaaatcttgctttaacccaagaaactaaatttgaaatctcttctcggttctgtggataaagtgggtcaccgccggttaaggtaaggccttggatatacgatttgcttaaatgggacgcaagttctttaacggtattcatagtgaataactgtccgttacgagcattccaagtactacgattataacaaccttcgcatttatgcaaacatccagtgacgaagagaacgaccctacatccagggccgttaacgaaatcgcatggataaattctatcataattcatctttatatttccaagtatatcccttatgaatagattgaattcctttgcaacatttataaacagcagaatgaaaaaatcctgcatttcttatttcagttgctccagttagttctattgtatttccgtctggtgaatagccaataaccgttttggtgttaaagcgatttctagaactatttttgatatgctctttatgattagtagacaaagttcttcctgttagcccatcagatatcctttttccaaaatcatcaggaagagttactttagacctagctatgctcattagcttcttagttttatcgcttctttttgcgccacgctgattttcaaatttcttagcttttgcatacgcgtattgtgaagaagtaacttttctatgcttactattactcattatccaatatgcatcatacatctttccaccatatattttagccaataaatggtgagcagtatagtgggccttataagttaaaaatactaagttgtctaaatcatctgaaccacccatacttcttggaattatatgatgaagttcatacccggctttagtttgacggggcttagatgggtgttcagcagaattaactagatttgaatagattctgtcataattcattggtgcttaaccctatgcatgatttctttatttttaccgagattaaatccgcgttcgttcggatttcccaaataaccacatgttcttcttatggtattcatctttttaggatcagtttctccacaaatagaacaaacaaatccgttttcagtaggagtcatttcatgggtacttccacatgtaaaacatttatctactggcatattaacaccaaaataatctaaatgctgtgcagcataatcccacacggcctcaagaccttttaagttatttttcatatcaggaagttcaacataagaaatgtgaccacctgtcgcaatgaaatgatatggcgcttcacgagaaatcttttcaaacggagtaatattttcttctactgaaacatggaaactgttagtgtaccagcctttatcggtaacatcttttacgcttccatatttttctgtatcgagtttacagaagcgataacacaggttttcagcaggagtcgaatataaactaaaagcaaatccggttctttcagtccactgtttaagatgagcattcattttagttaaaatttctcgtccaatatcacgaccgacaagaatattcaattcgtgaataccaatgtatcctaaagacactgaacttctaccgtttttaaataactcaattatgtcgtcatcaggtttaagacgaaccccgaatgcaccttcttggtaaagaataggagcaacagtagctttaactccttttaaggaactaattctacacatcaaagcttcaaaacataaatccattcgttcattaaatagctcaacaaatttctgttcattgaactgtgttccaatataagaatctaacgcgatgcgaggaagattcagtgttacaacaccaagattattgcgtccatcaagaatttcattgccagtcgaatctttccatacgctcaagaaactacggcaacccatcggagaaacaggaacagatgaaccagtgatagctttattgttcttagctgaaataatatcaggatacatccttttgcttgcgcactctagagcaagctgtttaatatcatagttcggatcgtctttataaagattaacaccttcttcaacgaacataacaagcttagggaaaataggagttatcccatcacgaccaagacctttaatacgatttttcagaattgctttctgaatcattcgttcagtccagtcagttcccgtaccaaatgtaattgttacaaaaggagtctgtccgtttgaactgaataacgtgttcacttcatcaatgtgttcagtagagttcgctacttctctacccgtttatatgaaacaatgtaatttggataattgtcatctaaacacaaatctttaatacgacttgggtggagttttaaatctttagcagcatccacaaatgatttatagatattgtcatttattttaacatattctgggacgggatgaattgttatttttatatctataacatttggatgattactaacctgttcttcagagcatttaagaaattttgcagctgatttaaaacttctaaatttatttccggattttaaagctatagaaacagtctttttagccgttctactaccaatattatttttaacatgagcttcacttctactattatttttataatgctcaatcaatttctctcgtatcttatctttatgttttaaagataagattttacctttatgggcattactaagtttttgcttatgttcttctgaatccggatatttgttaaatttatatccacctatagatttattaagaataaattcgttattaaaatatttcctaataagcatttcttcatgtttaagggccgattcataagaatcaaaaacttgaagaattatccacttagctttataatctttaagcttttctttaacaagcttagatgacgaattgtattctttccaatttgtatctttaccatatatagttttgaattttttaaaacctatataaaaagacttatcaggaaatcttaccatataggtaaatgctacagaattggcaatttttaagctttttcttaatttccatttcatcgtttcacctcgtattcatatttatacgaggataaacagctgcatgtcaccatgcagttcagactatatcttcaactcttagagttgtctgccgtttcgggtcgcttgaccctactcccttacattcatcagggatagtcgttgggcatttacagctactgctgatttagcaacggattgtctcagtgagagtttcccgttttaggcagattttacatgagcttgacttacgttaactcataagcttggaatgcatcgtatacgtctttttctgttttagattgagcataattcaacgcatcagcgatttgccatttttctgcatcctcaatatgttttgcataggtgcgtttaacataaggagaaagtactttatctacattcgcaaaagtcgttccgccgtattggtgagaagcaacttgcgcagtaatttgtgccataattgcagtagcaactccaattgatttaggagtttcaatctgcgcattaccaagcttaaatccgttttcaagcattccttttaaatctactaaacagcaattagtaaatggaagagcaggggaataatcaatatcatgcacgtgaataattccgctttcatgcgctttcataataaaagacgggaccatatttttggcaatgtgtttagacacaataccagccataaggtcccgttgagttggaaaaacacgagaatctttattagcattctcgtttaaaaggtctttattagttttatgaattaatccttcaatttctttttcaattgtcattttaaactctttctaagctgcttcttgaatgaagctattaattgtgttttggtgtcagattcattatattcaaatcctctttgaagcatctcggccatcatttcctcttttcctaaacgagaaaattcctttgatttatctccaacaaagttagggtgaatattattttgggtgtaatcggattttaaataagtaagtaaattttctaaccattcaagataatcaacaccttgtccctttaagccagaacgattaaatttatgcttcatttgaccttctgcagcattgcatagattacaaagcaatccacgcacctttcctgcttttggtccatttaattcatggtcatggtcgaggtgattagcttgaacatcaggatttagttctcgttggcaaattaagcatttaccgttttgtgcatcataaaatttctgtttttcttctttgtataatttgccagtcaataacataataaacccttaccttaaatagataagggtatttattattttcaagtattgtaaaacatttgatgcaatcgcttatattgctgaatcattcggtcagaaaaagaaatttgagtttcaagccattcaatgtactctgcggcagcttgcattaaatttccttcatagccatcgttattttcttgtgcagctaatttagctaatgcgtatgaaatacgttcaccttgaaaatcggctttaggcttctgaacaacttgattagttcgctctacaacttcttcaatttcgccattttctactgattcagtattccacaaacaccaatacgtaattggcttatcgtagatgttaataatctttccatcagaaagttcaatttcaataattccagtgtcaggctctatatcatcttcacattcttttacaagttcacgaactttaaagacagtacctgcactaagttccggccagtaattacacagccctgtatcagcacgattaattctaaaccatttatctactgtaatcatgtcccatctccatatcaattaagtcatttatcgttggttcattatacaccgtttcttcatcagtgtaaaccggttcttccggctctggctctacagtttcccatctagccgcccaccaaggttttatagcgtaatccattctcgtactgtctgagttactacacgttctcgaagctcaaccagttcaacagtaggaactgcataataccagtcagaatggtaagaacctgagcgagattcatttacagccacatgtacattatgttttggactaaaataaacacactgacgatattggcatttaccatcttgcacccagtcttctatttcgataggtttaagatagtcggaaaaatcgaaatcatagttttccgaaaatgcatcatggtcttcaatgatttcgctcagaactgcatcaacatctaatttattttcaatattcatttttcacaccaccaactgcttacttcaaaatcgggttcgccatgttcccagaaccaggggccgataggaatccacttaccttcatcggtgacgtcatattcttcggatttaagcccaacgtatcgccattcgacttcataagcggtaccaccgattacaactgtgttctcgccatacgggttagacacaacaaagtctataccttctgctttagctaaccaaatcatgtattcatagagtttatattccaggtcgccttctgttccatcgcctagaaaaataatttgttcatttaattctatcatttaaagtattcccgcaattggtcaaatccaccaatatgacttccatcaggagcaaatacctgaggcattgttaagccgatttgagtatcacgacctagtttagtcagaagctcagcaattttctcatcatcaaaaacacctttttccggcataatgttgataaattcaaacggctgtttcttcacagtcaaaagacgttttgcattatcgcaatacacacatttatgaatgttgctatcataaccatatactttaaacatattattccttaattcctagtacttgtttaaaagtctcgtcgtaatcaagactttggcccgtttgttctttatgcttgtatataatatcacttacttctgatagcatatttttatatgaacgagttaaagcagatttaagcacgctgtatctatcaggaaatttaccgtgttcattataataagctattgctaattcacggactgccttttcagcagtctccatatattctttacgctttgtcattttcttctcggtcaaatcggtgtttacaatggcgacatttataacgaagattattagtctgccaatggaccaattgcacctgttcagttccacattcagggcaattaggaacgtttttagaagccctttcgcgacgttcaaccatgaccattacagaatcccaattaacaggagggctataatcatcacaaccataaatctttccacgcatttccagatcgtcttcttcaccagccataataattttaattagactagaattacttgaagctgcaatgtcttctaatagacgctttttcatttcaatacctcaatagcattacgtaaaccatttgctttggcggttaaatccttaagaactttagtatgctcttcaatctgtttttcaacttcaatcaaacgggtactgagatattcgcgttcttctttcatagtatcattcccatgattgggctttggcgtaggtttaaatttattagggtcctttaacttaataacaactttagtttcaaacagtgaaagaccataattcgtattatcatcaaaggattcaactacgtccattttagacaataacgtacgaagtttataagtcaaagaacgaatcgttttattatgtttattagcttcacatggtttcatatatggaagatttttatatatttcatgcggagcacaaacaataattaacaattcaaatggtccattctgagatgatggaatgaatttagccgtaacccaatcttttacatttacattaatagtacgatcatcgccatgacaaaacagtctacgagaatgcttaaaaagcatattcacattattattaaattcgtgtgaaaactcactggcaaatttttctttactatctttagaaaaccattcttctaaataagttcttttcacgtcgttaataatattaaatgtaacaacattatcatttgatacattagtctcaatgtagcttggatacataaattttttaacattattaacagctatcacagaagatagtaatcgggaacgtttgaaccactcgagcaaagaaccaagagaatgtgaatacgcattttgtgtatctttacaaatatggttttcccatccaatatagtctaaaaaatcacgaagaatattattgattacttctctatgtcctttctgataatcacgatgtttagtaataagactgtcaaaataatcaatataatgtttacgagttttcatgttcttctcacttggttaatgatttatactccgagccatccttggctttaaattttacttaattaactgcaaagcttgttctagacgatcaagacgattaacggattcttcccaaatctttttagcctgctcatattctttctgcgctttattagaaatttctagaacttctttataagctttttctagtgcaataacttctggacgaatttctatcggttcaggtgaatcatcaagacattccattagttcctcaagggtagtttcttctttaggagtattcacaatttcatcacatttttgttggtaaatttctttactagtaggtgaataagcacatttcacttcacgaaggctaattacgagtttatatccttcccaaccgcatatattcttaaaaggatatgtatgaatattttctactgtttccatacaaagtaatgcggtctctaattgacgagttatagtgctagcaattgagaaaaatttattaatattcttttggttagtttctggtgtaaaaaatccataattcacaaaaatagatactttatttttatcaagttcatattcttttatgataatcatatcagaagccaaaggatgaatttgacgataatcgccataacataatttagaagctgattttagaatttgcttcttgaaaagtctgaaattactaatccaacgacgagtaaaaatattctcagggtcttctttattattgagatgataagaattaacatcaccgaaccaattatatcctactacatctttagttcgtttaatttctttcccaaaattaccaagaatatcccgattaaccaaatatgaaagaagacgagactctttaaaggttttcttgataacatctttatctacacggctagaaattttacgaatttcatgaataaatttagtagaagaaacaatacttgcatcaacactattgagccactgattgataatagaaagaacgctattttggccaaacatcggtatagctttatcatcaataacgctattgaatgatttgatatattcgttacgagtcatattaatctcctcagtagaaagtaagaacattataccacatccttgtggcaaagtaaactagttcagtgcatttagtgcattgttcagtttagaacgttgctttgtcagattttgaacccttgactgagcttgttctaacgccttttcagcttctagcacttcattggtcgctttaactaattcagcatctactgccttaagagacttctcaatcgcatccgcgtgccatttttcaacaggtttaagacttggattttcaacaggaagaaaattcactttattgaatttccatgcatctttattacctgagctatacatccaaaatttaggatcgtttgataagtaattagataaatttaagttatcttgcacttcttgctttttctcttgtgtgacttcgtcctttctcaaaaattcatatttaaatgaaacgatcatatcaagttcatatgatgttgtatctaacttaaatcgttcaaaacgaggtaaaatcttagattgaacagcagcaacaacatccatatacttaaatgcttctgtcaactgcgatttaaggcattcgcaaattgaaagagaattttttgtattaggtttaaagctaattcgtgcagttctattattttcttttaacggtcttacttccatctgaagagtataaccatcaaatttcagattctttaagttaatgtcagagccttttaatcgactagcagtagacaaaatttgctttaattgtctacggaacagagcaataaatctccattcaatacgataatgatttggattgaaaaatccagatgataaatcgaccttactttgaccaacgccttgaacaaatagaggatttttataatcaatagttttacagaaatcggtgagctgttcacgagcagtcatttgagtaatataccctgctttactaaaattacgcacccattcactgctattcgtatacttaaagtgatgaataacacgattaactttatcagggtctaaattattttcacacaaaaatgtcataacatcacgagtatagctggcattacgaaccatatcttcaatttgagaacgagttttcatggtgttccttaagatttaagtaaatcaacaattttaattaacttttcacgctcagatttagctttactactcaatccagatagtctgaaaatttcatcatcatattgttgaatagaaatatcagctcttcaatttgcttattaaaataatcaatttgttcagaatgtttttcgttactacgaactggtacaggttttgtaggcaatttagttgaactggattcattcgggcgataaattaaaatgcaatttgaaccaatcgggcatttagcaccagatgaatattctaacgttccagcttcttttaaaacttcaaaagctaaacagagatgatgccccatattaacataatcagtagagcgagctctgatgtaataatcatctccacgagtgctaaatttaaagcatttaaggtcttctgtattattagttttaaaaatcatttgtttatctagacctttagccaatcgagcacctaatgctaataatcgtcgttgattttcccacaaatctgcgatcatttggtcaaatgataatttcggcattagccgaccataaaggtcatatcctttattataattgcgaaggatttcactcgcattaatacgagacaacgctccaattttattaagggctttcataatacgattagataaactcattccagacccgtttgttcgctgtaaatgtttttctaatccaaatccaatatcaactttaaatttatctaaaatttcagcatgaacatctctgtcaataacattcaaatccaaagttgggttaaatctatgaaaaaatttatctggctctccacgacgtaaaacagtccattcattcatcatttttttattaactaaagatttaattactgcgttgacattattaattactactgacatattttcctcactcaattttaccaattacgcggaataagattgaacagactatataagtaccacatatagattgaactaatgccattccaaagaaccaaacaatattatcaaaccatgtctgttttacgtcgaaaggacgtaaacttacagtaatattatcacctttttctattgaagaatacgtctctggggaaatatattcactaaatctataaccgtctttgagttcatatacagcaataaacgataaactagacccctttccttgagttcctgtaagggtattaactacagtaacatcataatctttataatgcatataatcattaattgcgtaataaccatatgcaattactatacataaacaacatatcaataaattcaatcttttaattatcaactgtttcataataatctcaattaaaagggcttagaaccattataccatccttggtataaagcggttatgcgagtaccgtatttaaccgttcttcaaacttccgaagagtgttctggcgttcagctctttgctttttgtaagtttcaatacgctctgaaatgagagtgtatcgttcatttactgattctttcataaaatcaggaatttctcgagaagctttaatctcgtcaaatttatcaataacagcttgctcttcagcaattaagttatcatacatcaaaatatctttcttgatgaactcaatatcttcttgagttacacgagataatttagatgctttatcctttttgtactgttcgttagtatcacgagaccagtgtaatgtacgatttttattcgtattcttgtaaatttctacaataccaatctcatcgataataacgatccaattccaacgggatttgtaaatttgtcctccattaacagtgatttcacctccgattgagatgtcattaaagaacttgctttgtgcttctgatttaaatttaccatcgttgtaatttaccaggttgaaaatatctttagcgttcattttgtgttcctccgtagttgatagttgtatagtaccacagaggaacggtcttgtaaacaactaaaagaaacttctttcacaattttttccactgaaccaagcgctcactgctttcttagtttcaggagcagtgttatccataaaccattcaaaggcagcctttttatgattctggagggcttctcgggctttaatctgctcacggtctattaacactaacatatgagcctttcttgtcaccaggggcttcttatgattttttgaatactcccaatcatttgtccatcgcatcgttgttgcgaattgaaatacagcttctttaatcttagtttcgtaaatttcacgagcctttgagtataacatcattacctccatttaccagtttaattctagtcatctttttgatggcagtccatataatctatttctgaactgcctttttgtcttagaaggcctcttatgaatttatttcagaagagtaacccgtagcgatttcttcccaaccgtttttgtcggtcataataaagtcagcaagataaagtgcagtacgcagtgaaacattacgtaaacggttaacattgactttcatccatgataatgctttataagtttcttcatcagaaagaccacgcttttgcatcatgtcggttgaaagaataacatcttcaaccctgaccataatttcttcattagtgtgaacacccaaatccaaataaactgagcgggacactaatgcttgtaaatgtggagcaagtttagtaccacggtctaattcgcggtcaatgtcaacgtttgtgataaaaacaattgttcctttaaattcgagctcacgctcaatgcctttttcttctaagtaagaagatgcagtgctccagcagactttacgggtctctccagtgtccagagcagctttcagaagattaagaatgtccatatcagagaaaacatccacatcatcaatcaaaaggacagaattctcttcacgattattccaaagctgttcataaagaccgataccagagattttaccgttaatgcttttatactcaatgtatccaatatcatttgctttattcaaagctttatctaaagaatatgttttaccaatacccgccgcaccagagataattaatgaacgaatatttccgttaataataccattcgtcatcattcccataacattaaatcttttattaatgcgggttttcatatcttcatatgattctttaacttcttcaacttttacaccatcatatgaaatgtctgatttgtaaacccaaacaccgcgacgtttaccgtcaatttcaacaaaaactttaccatctccttgtgcatctaccggagcattatcagggaaccattcacctaagagctcaaaagttccagagatttctttaccgaagtacatacccttattgatagttacagttttcattttattctccaaatccgtatcagttgatagttgtatagtaccataaagctttatgcttgtaaaccgttttgtgaaaaaattttgaaataaaaaagggagcccgaaggctccctatcatttataataacttcgatggttttcaagataaaccctctcaaggaagtcatcccagaaactcatgtctactttttgctgcataccgttcttagaagcttcagtagatgctgcttctacttgatcgaccacatcttccaaaaactcttgaacggttttaaatggatgcttacccaacttcacgtcgagaataaatggagcatcttggagtggataaaccaagtcaccagttttgtaaatttccaatagttgaagtccaccacgacaagcatggctcagagctttccagtcaatgccttcattggcttcggccttacgagcacgttcgccgtattcagcatctaatttgttcagtgactgcttaagctcaataagagaaagcgttgtctgatatttacgacccaacactgtgtaaaacgtttgtgggcctgttttctcatgattatggaacacccattcacagaattcgttttctggaagacgatgcttaatatcttcaactttagtacgacgctgcttaatggaaccatcttcttggtaatcaacccattgctcagggatttgattaactactttcaatacatcgcgtaatgcagccaaacgagaacccttgacgccgtatttagaagcttgcttgcggacatatcctaaatatgatttcatgttagtcgtataaaaacgagaacggttgtcttgaataaacttccamacatcaggcaaatcggatttaaccactagttcaggtggagtgtgaagcatatccaatgctacaggttcaccatctgctgctaatttaaagaaatacttaagactatacaattcgtggtcaatattatctttagtgtttttagatgatgtgttgttggtatttttactcatgtgctctttgacgtttccaataagaatatcgcgagcaggaggaacaaagatttctttaaaatctacatcagattctggagtagaagttccataaagatgactaccaaaataagacttaactacagttttcattattagacctttcataatcttcattaaattgtacaatcaatcgatgataattagattttggatatcctaatttacttatataagttccgaatgacccacgtttaggtctatttaatttaatccataacttataaagtaagtcatagtcttgccaatgtttaccagttctttgtctaattttagatgaatttgattgtttctttttagcttcaaaattattcaaagattttttgactgcagcagagtgtttttctttaactcccggtcgtttaaaagcagctttcacccctttagatattttttctttaacttccggtttgttttgtgcttctaactgggattctgaaattttagcccttatttcaggaagacttaatgttatcgaacgtttttctctgtattcattagacttccacatttctttcattgtattagaatgtatttttgaaaatttttctctaactaactgatatcctcttgaagttaatttgagatttcttcctaaagaatcttctccaaaattataaaatgaccaccatgcataaattaatccaggcgaattgtaatgaattttagctaaaagccaatgggctataaaatgctctctagctgttaataaaactagattatcagaatcatcattaccaccaatacaagatggaataatatgatgcttttccgtataaaaatttaatttagatttatctaattttctgagttttcctttcttaattaaattattatatactttagtataattcattggttcttcgtctcatttaattttgctttgcatttataacacatgtctgttccacttgaaataaacatatttcctcactttgaaatcatagttggaataacagaatcaagataagtctttagtgcaatagcttcctctttctttaatgtaatgatatgtgatcgaaaatcatcaatttgacgaatagatactacatctccctcttcatagcattttgaaacatttaaaatagtttcatcattctgattacaggagttagtaataatagcattacattttttaaaccattttaaattatgttttcttttagtagaatcataaaaatatttaatgttagttataaaattatcccaattattaattgataagcacattgactcgcttttaatattaaatcctgggcatgaagaataaaaatgaattttatgctcatcattaatgcttacaattttatcagtgtaagcatattcaatttgggttaaacgaacaatttcgctaggcgtaaaatataacatgtcatcttcttgcgtcaaacgatacatgttatttactttttctatagccaattcaccaaaaagtggactaacttctaatactagtcgtttcgcctcgctcatcattacatactcctctgaatcatattaataatgttattcaccagattataagtaaacattgggtaattatattgaatcatcacatatataacaaacaaaactttcattctcttctccttggcagttgacaagattactataccataatcttgtcaacttgtaaaccattaaatgacgttttcgataaaattttgaagctttgtatgagcatcaaccatgattttcatttcttccttggaaaagctgtgcctctttcccgagaagaacattcatagtcagaaactgcattagcatattcttcaattagcttcattaaaaacatctgtttttcagttttcattattccacctaatcatttcaagatattgaactaacttagctttggatttatccaaatcccttttagctgcttctataccgtcgtatgaatatccttcacaatgctcaactgctaattgatatgaatctatttcaatatcatgcgctaatttaatgattttttcaaactgttcgcgtgttagcatacttaaactctcgtattatgatcgataatttcatcaagaaacatatctaacgcttctacagcattattaactttagcttcaaattcttcaatacctgataaggcaaagttaatgcgttcctcatctgctttacgaattaaagctaccaattccttaattttatccgcttgttcgatactaatcattattccaccacatatgaaagagagaatattgcacacgccatgtgagttgcaacttcatcacacatattataacgtttcttaagaagttctacaagttcttcactagtaacttcatccatgtcgacgaaaaaatcaccattaatgatgacgtagatatttccttcttgattgagtgcttcaattttcatgatgttctcctctttatccgatggttgtatagtaccacagctcaaacggaaagtaaaccggtaaaatgaaaaaaagtctcccgaaggagactaatgttattcgagggaaagaagatacttactctggtaaaacattccagtaatatcatctatcgtgctttggatggctggaggcatttctttataaatgctgttagattggtctagtatgcgatcaatcattttaattgtgtcggtaggaagtttactggcatctggaattgaaggcgtgtattttcgaccagaataccccaaatattgctcaccaaatttatcaatcaaatctggcaactcggaaaaaataaaatcgtatgctttgtgtctagcataacttttagtttcaaaatgtgcagaatgaaaataagcttgtgcagccattaataaacctaagtattcatctgcctttgaaggttttccactttgtgaaaagtcgctgaatttcattcagtctccaatttaatgttcataattctagcgtatgattgtgccatctccgcgcctcgctctatacattcaaaatcagaagagcacgggtcatttttataggtcgttctcataaaactatagaattgttcagacgattctacgcttttattttcaaaaagcatataaacgtgcctaataccagattccataaatttatcaaaatgaggatcgacattcgcttcaatcgatggagataaaacaaatgacaatcctagcatggcaaaaagtgctgttgcttttaaggccataaaggcctcctatcatttttgtcctgtatttactttgtgccgatgcacggccttaactttatcaaggtatttttcaaaatttcgcaatctagtatagtctgccggagattggttgagtgatacttctcgacgcaaagctgaaatgatatttccaacttccctacgaatttcatctaattgaagaacagtaagattgcgaagttgcttttcagttaattgtagcatatatacccctttagttagataaacctatttataacttttgcactaaccgagctttttagttaattcattccaatgttttctacacaaagaaacataaatttcatcaccaatacaaatttgattaccttctttaactggtgttccatcttccattaatcgagctgtcataatcgcttttttaccacaatgacaaactgcttttagttcaataagtttatctgcaatcgctaaaagttctttagaaccttcaaataattttccagcgaaatcagtccttagcccataagccataacaggaacattatatgtatcaacaattcggctcaattgatgcacctgttcagtttttaaaaactgagcttcatctacaaatacgcaatgaatatctttttgtgcttcagcccatttatagaactcgaaaatatccatatcatctgtaataatattcgcttcctgcttaattccaatgcgagaaacgacttcacagacagaatcgcgagtatcaatagcaggcttaagaactaatacactcattccacgttctttataattatgtgcagcaatcaaaagagaagcagattttccagcattcattgctgcataagtaaaaattaaactcgccatcttagtccttagttaaattttctaaatatgtttctaaatcattttcagctttatcgatagattttactaattcgtaatatgtttcggcatctccatattcagaagatatttcaaaagacaaatccttttctaaactaataatttcaccaactaaaaataatatttcgttcttttgttcgcgagtaatcataaggaatttatataatcaatgagttcttgttctttattatcgaattctttagaaagttcttcgtactcgtttgcgctaaaaggaccgcattcattacaaactttttccaattcactatttttatccataacttcgtggataagagaaaagagtgtgtctttttgttctttgcttaaactcataaccatgtcacctttaagcagtattcttctacatgctgtttacgacctttcttatcaataaaggtatattcaacgaatgttccaatgtagtctttatctacatcatgtggactattaattggacatttagtgcgacaaatgcgttcccattgacgaataattactgccttattctttgggtcatatggatgtggataatgtatattcataataatggttcccaatcaacaatcacaatttctaatttagaggaatatgtatctaaaatcccctcaataatatcccagttccctttacctatgcctgcaccaatcctaggcatatagattgtaggtttaatcagtttattttcaccaaactcatttaattctaacatacaattcattaaagcggaatactcaaaatttggccctggttgaaattgagtataaagattgaagcagtaagctttatgagtcctaaagtatttttcatagactgagtaagaaccgagtttagttacatcaccccattcagtctgtaatttatcagcttccaaaattttagggaaagctttggttaattgacccgctacgcctgaacccatagtatgaaaacaattacatccatgtgcaatatttttaccttcagcgaaaagggcgacaatatcgcccttgatatattttacaatcatctagtactcaatcctcgattataagaatctaccaaacggtcaaccattgaatgacaagcggctttatctttctcctccgcaactgaacattctaaggtattccactttttagcatatcgttttaacaatgtatcgtttttgtatctgcttgatttatctctttctccgtctttatatgcatatattaatttctgtgcaaattcagcttggcatgccttatttttcccacaataatctgccgcagtgcggtttacatattctctaatttcagtatatgatgtatctgctgacgcagaagcagaaaatgaaattaatcctatacataaaaccaaaattttagtcatttactatttccaaaagtttattatttttaaggtaattagccttttctaggacttcagaagcatatttagaacctgctttaacattccatcccgaattataagaggatattgcttttcttatatcgcccttatgtatatttaaccaataagaaagttcaatgtacgcccaggaagctgaattggatcgtttattcaacattctttttatttcagcatcggtcatattataaccaagttccttaactcttgctcgcatagtaggcaaataattttggaacattccgtaggcgtgatgctttggtttagattttaaattaactccgccagagctttcttgccataaaatggcagccattatatgacctaatccgctcttgtggatatttttgtgtgttttatattttccatccttagaaaattgttccccgaattgatacgcgtaacgcatgttatcgagttggacattactgaaagtatgctcggagctatgtgccatcattgaaatggccaatagaccagcgagtagtgcttttctcatgcttacctcattgagttttaattactgctttagaagcctttcctggtaaacgacgactgttgataattgccatcctacattgaagtgacgggtctttgaacttctcgttaggtttacaaactgtaaatccaagccaaagatttccatctgtgatttctaaacgtccaggacgatattcaaccccatcaataaaatcctcgtcaatgtcaggacgcggaggcatactcaggaattcattaacttctaaaacatggtcttttattttatggaataattcaaaaacgtatgtctcatcaatctcccgttgaattgcgcgatcaagaagatgttgagaatattttagatgaaacgatgagactcctgctgcttttgatgcctcacgaatctcattgttaatttgacgaaactccgactcaaagtgacgacgaagcttatttcgacggataaaaacttctgtattgatagtcatgttattctcctcttaactgatagaaaaattataccacagtcaagaggaaaagtaaacagttattctttaaatctaatcaatttattcatagactttgaaacttcggcacgaacctcatgtagatttttgagctgttcaagacgctgcgtatagtaagcaatttcatcttcttcgagacagtcctgcgaatcttctttaagataacgtgcatagtcctggaaagcgttacggactacttcctggaagtcatcaagactttgaattttcttaggagcaacagatacacgacgaggggcagtataatactcataaccaaaccctgcgcttaattgagccattagtatttttcctctggttggaacactgcacgacaagcccacatactggcttctttgagtttcgttttagcaatagttaactgatcgagactttcagcataattcttcgcgaattcacagtcttcgcaattatctagtgcttcccagaattcatcatataaagcatcaaagataagtcctaaacgaacttcagcgtctttaatagcatttactttaccgattttctcttcagtatgtggtttataacccttaatatcttcaatcatatttgacttcctcaccagtacataatacgtattcaactaaacgaataggttcatgaatgccatagccttgaacagaaatttctgtcgtaggataaattccatcaatatcacccatattccacgcttcattaaattgctgttcgcctgagttactaaaccactcgcgaaagcatttagcacatcttcagaaccttcaataattatctttgccattacaaactttcagtaaaggtacgagcgataacgtcgcgctgctgttccggagtcagagagttaaagcgaactgcataaccggatacacggatggtcagctgcggatatttttccggatgcttaactgcatcttccagagtttcatgacgcagaacgttaacgttcaggtgttgaccaccttcaattttaactgtaggttgtggctcaatttcaatttcacgggcatgcaaaccatagaaaatttctgggtctacaaaagagtcctctttaaaggttttagagacaataattcgtgcttgaataccatcttcaaaataaatagtacctttatgtgtgccttcaagaatttgatatgctttcatataaacctcaattagaaaataaatttatccaagattgttctttaattaaaaatggctcagaatcatatgccattaaactttgcgtaattaatcctttaaaaggtccatcaataaattccatggtaaaatatggaattttattcattagccgtgcattaggagcagtgcacaaaactctgcatcctttgaatacgcctttttgtaatttgtattgcttgggataaaattcgctcaaaatgttattttttgccaaaatttcaaaatgattcaccaatttatttttaatagtttttggcgaaaaataaagatattcgaaaagctgagtgtctgtcatcattgcattccgattacgaaaaactgtggacgagtaataccaccaatgcaacatttactattacagcagtagtgtacggtgtcaatatggacactataaatcttatccatatcaggagatttgacaggctcatcaattatatacaaaattcgcgaaagctttaaacctctgaacttgcttcctttattaccaataaaactgcgtacagaatcagtaaataaacgaaaacgtatatcatcattagaataacgcgaaaattcctttttgatgttatttgcagaaattttagcataagctgaagtattagaaagaacaataactgttccgccatcatacaaccaattagcagcaaagttagtcacagcaattgatttaccggattgacgtccaccatctagtcgaagtgtacaatactgtttaagtaagtcttcaaatggcgggatatattcgtttttacaaatttcttctactctagcatcagaatggtgtgtaaaagcattcatcagggatagataaggaccagttaaaaatgttctcatttcttctctataagctctataagtttgggccattccgtggcacatgaattgtccatttctgtatttacccattaccgcgcttgggctcgaccttattacaggttggcgggaatccctcatataatcatgaggtccaggttgttcccttatgcataaatcgccttaccgtagtatttgtaccaagtaggacgttgtgcaattttttcatctaaacgagcttgtgatatagcaatagaagcttcatggggaatataatcaccacggaattcctgaggaatatcactaatatcctggactgtagtatccttgatattaaaaccacgttttaaacattcagctataagctcaatttgacgtttacgtaagaactcgagcttatcgtaaaagaatgtaacatgacctgcgccaaggataaaagtaggactgattttaaaatcacgaacacgtttaccgttagcaacatgcttacgaactgcaccaaaaacacgcggcaattcacgatattcagccattaagtgttggtcagccaattcagatactaaagtaaggttgatacgagtcattttagtgttctcctgtagttgataggtctatagtatcatacctacaggagatgtaaactgttatttatctttaattgctttagctgcttcgatagccgcttgctgaaggtcatccatagacatgccgaacttagaagcaaagttatcaattttcttttcgacggcattcaaaggcttggcctgtttaccttcattagcgccaggaagagcgagaatacgctctctgtcaatataaaggcttacaagtttcttacggtctttatcgggcaaatcatgaaatgaatgggcctttttatttacagcggcttctaatttacctgcgcccactcgcgcttcggcaataaattcttgatatgttttcatatgtttcctttaaatgtaaatatttttattattctatcctagaattgtgataatatattcacaattctaggagttgtaaactgcttttatttaagcgtcccaagtataagctttattaagaattaccacgggctgcattagcaacggcgtaagcgtactgaatattagcgtctttaaacttacctttagaggtatctatttctgccttaaagccgcctttagtcataacatcggcaaattctttacggaaagccattgcatcaagacctttccatgatgatttatgcttggcaaattcaagacctgcgaagttgacagctttagccaatttattatcaatgacccatttaccggctttaggcacaaacttcgggcctttctgtttagagaacagttttaaattccagcggcgaaggtctgcatcagctttaacaaattctgagtctaagttactagcaacaacatcttcaatatgagcaaatttaagtccgtcaacttcaatatttaaatcggtacgccagcgaagtccttcccaagcgaaggctttaaagtcggaagcctttgtagctaagtaccgttcaataggagctgttttagggtcaaagccgtttcctgatcggtaggtccactcatctttgttaatgcctttggcctttactacagaagcttcggcaataaattcttgatatgttttcatatgtttcctttaaatattttaattagtaattgtctattcaagtaattgtgaatatactatcacaattccaagagaaagtaaacagctttatagatttttatacgcgtcccaagtgccagttctaaacgttgtaatgactcgttttgcgcgattaggtgtttgattataccatatacttttagctaagttaactgctgcttcatcccagcgtttttgttgaagcatacgtaaagagttagtaaatcctgccacaccggtttctcccatttggaaaaccatattaatcaatgcacagcgacgaaccgcatcaagagaatcataaaccggttttaatttagcatttctcagaattccgcgaacagcagcatcaacatcctgattaaagagtttttcagcctcatcttttgtaattacaccattgcaattacgcccaatagctttatctaattcagatttagcagcattaagtgatggactttttgtaagcaaatgaccgatgccaatagtgtaatagccttctgtgtctttatagattttaagtctaagacgttcatctatacgtaacatttcaaatatattcataatacctcctaagtatttatagaaggtatttataaaattaaaagaggttgttcattattcggtaaagtgaaggacccatcacatattgccactgagtacgaggaataagagcaaaagcgtccatctctggaatcataacgccatctttattttcaaaataagactcgcaacggcaatttctgaacatctcatgctctactggaatcgtgtaataaaataactgtaggtctttattactagaatatttaaatacacctaggtcttctagaaggtctggattataattgctaaaaccagtctcttctaaacattctcttcgtgctgcatctaatgcgcttaaatcagaattttctacacggccctttggaatatcccaacgatgtgccatcattccagtcttacgagaaccagtaacccgacccataaataaatctttatcttctgtcataaagataataccagctgataatgttttcattttaatttcctgcattcagtgataaagttatttaaattttgagcatatttcttttcatcaaaaatcttttgctgtctgcgtaaccgccatggcatttcaatgaacatacgccatatccctagataataccgctgctgtaaaaatattaacaagtatagttaaaagaatccaatcgcctattctgtccattggatttttataaaaaagtaaaatacgaatgatgatataggaagactaatgatataccacagaagaaccttcttatctgtgaaccaatcagcattcgttaacttagcgcgaccattttgaatacacacgaatttatcatctgttacagtaaatggcttagctgcttgatatcccattctaaactccctaattaatcgtttctttgtatcttcggaacaaccattccaatcaactctatcaactggaatgccatcatccccatcatctaaatcataccagcgagtttttaaaatcatttaattttcctgcaatcaatcacaaactctttcattgattcattttcaatataagacatgtagctattatattcttttaattgtattttgtaatccttttttctttgccaatttattttaaaattatcataatgaaaatataaaatgataccaaagaatgaaaacaatgaaataattttagtataacaaagctcgctccaaacttctattatatctactgtaccactgatttttaaaataaaacagtcaattaatagtccaataagactacctgtaagagctgcagccaacgccacagcaaaaattaaaaatgactcagaaaacgaatatttgactttatttagctttggcttttgcatcgtgattccttaacaaatttcataatttcattaaattcatactcagcaagtttaagctggtgttcctttttaatctttttgcactgggctttccaatcacgtacgcgtttacgataatgtcttccttgataccagtatcctatccaatttacgggtactaataaaaatggaactaccaatggaagagttagcattaacataattattacgccagaatcaatatcagtcataacatctaaaacacctccaataatcaatagaattacaaatgatatagctatcacaggacctattaatacatcagtagaaattatctggcgctttaattcatacttcaaaggtttacttggaaggtatagtgatggctttgacatattctctacattccttaacaaatttttctagtaataaatcactttcaaaattaggattttccactaatttatcaaaaagatcatcaacaatattcaagatatttcttttactaagaatacgtttattttcatgcttcgtttcagaatcaactataagagtaaagaaatatttctttccctgaaattttaccgtagtatcaatataaaataaatttgacttttgtaaattacgtttaaaccatgcgtcacttaaactataaacaccgagataatcaaaatcgtcgtttaaataacaaactgaccattcaggagaaatgaaatcagtaaattcaacatcaaaatcacatgtcaatgaatgaattgattcaatactgttaataagtattccaggacgtattaaagactttttacctctggaaaatcttccagaaagactttcatcagtttcatatgaagaaccccaataataattacgtccttttgccatatgtttaagagcatttagtaattggtctggaacatcaacgtgtctttggaactcttcaaacattgaattgaaatcactttgcattttcattcctatttactccaagtaataggggccgaagccccttatcattatttcagagaattaatatattcctgaacatcggcagaggtagtttcaaccccagaaatattaccattaaaggtttcaactcgagcaagagtatcttcaatatcaaccttagtcagtgctgcaatttcaactacatcatcagcagtactaattccaagggcatttgctgcacgagtttcacggatatattccaatttaactgcaagttcttggcgagcatcatctaactcaactactttcttggcgatttcaattcgcatttcagcataaccatcagctttagtagtcagctgttcagctgttcgacgatatagcaagccgagtttagcatgcattgttacatcttgaccttcggaaagaagcttgcgaatttcacgctcttttgattcggcctgtttattcttttcaacaataagttcacgaatacgtttttcttcattaatagatttaacagaagcagtttttaggtctttaattttatcaagtagttttgctgctgcagcagtatactgttcttcaacagatagatttttagccattgcagaaccaagtttagtgcgaataaactcaacaattttcttcagtgtgttcatagtatttccttaggttggtataattagataatataatatcacgtttctaatagattgtaaacttattcttcgtctagctcgtcgataaaggcgttgatggcctcgataatggcatcattgatagccaataaaataaaatcatcgtcagtacctttagaagattctaaagcattgatatatgcttggttgacgagttcccaagcctttttaaaataaggagcttcatcatcaggacaaatatcccgcacgccttcaaagatacgtttggcataatctaacacccattgtacaggcatgttttgagaacgttcgttaaactctttaaagtccttagattcaaaaagctcttcaggataattatttctattacaaaaagctttactaaagttacgtttcataatgttttcctcatttgtataggctcataatatctcaatcatsagcctatgtaaacttatttcatattattgaaatattcttctgcgatttcgtcgttatcatggtaaactttagaagacagtttaacataactttcagcagtgaacatgttaatcacaacctttacagtataccactgaccgtcttcattacccattactgcgtaagtttcaaacatcggatggtcaggaccgataactttaatatcattcaccgtacgaccgaaatcttctgaaacacatttcataaagaagttgaaaagttcaccgtaattatccattttattctccaagttattttctgtatcagtagttgatagttgtatagtaccatggaagaacaaggatgtaaacagttttgtgaaaaaatttttaaaaagttttagggaattctagggcggagaggggcaattaaaagataggataatatattataaagggtataaactaaatgatgcctagagaggtctggaaaggcttagataccaaaaagccccaacctttcggtcggggctaaccgttgcggcaaccttgtcggggttccacctgccaaggcaagtgtttgtacgaaacgccgggattcgaacccggttattaagtagttgacgctactcaatatttttaaaaggccatatctcaaccatatccgaacgttccgtcaaaaacgctactcggcttacggcaaagatatttcctcgaatcgataatttggtgcgccgtttctgctgtgatgtaagagggcatcaataaacgcaaagattattaacgcaattccttactcagggaaccatcagtccgacgacttaccggtagcgacccggtttctcatttggtatcccgccctgggatcgaaccaggaccgcaaacttagaaggatcgtatgctatccattacaccagcgggacgtaatttaaaatttcatttttcgacctttaaaccatccttctggaattgggtcagttttcttaatacgtttagaaactttttcatctaatgaatgaatccacatcataccgaattgggaattcttttcacctttctggtgattatttttggcgtgagattctttcattttattaatagtttcaggagtatgatgcttatttagaaatctgctattatttaaaaatttttccctgtattcaggagttgaccacaaacgtttaaatacatttgaaccaattttacgatatttttcttgaagtaaaatatcattttcaaaacgtgacttaaacgatttagctccttttaagctagcatctttcttctggtttagcattccaggaatatttacatgatcccatccaccttcaccgccaagttttaaattatacacatctggtctatttaaaaactcttctgtgacaatatttttctcggcttcaagcatagattctttatcgtcaaaatactctaatatttctttagaaaaattttctataccatatttatcttgggctctttttaataatttaccagaacccatatatccatcatctaaattttcggtagaatgcacaccaatataaattttattattaattttatttgttattttataagtgtaatagaacataaatatctcctatttctaagagtatttatgttctcaaaatatgacccagaccagatttgaactggtaacctttcccttatgaggggactgctgctaaccattgagctacagggccttggtgctgattgacggaatcgaaccgccgacatcctcattacaagtgaggtgctctacctactgagctaaatcagcaaaattacggaggcgataggatttgaacctatgagtcgccggagcgactgccggttttcaagaccggtgcattaaaccactctgccacgcctccagtctccatacaaggatttgaaccttggacctcctgatcccaaatcaggcgctctaccaaactgagctacacggagtaaattaaattggagcggataatgagaatcgaactcacatcatcagattggaagtctgaggtaataccattatacgatatccgcaaatttggtgcgagaagtgggactcgaacccacaaggaaatcattccgcagcattttaagtgctgtgcctttaccaatttgaccattctcgcgctgggaataaaggactcgaacctttgcatctagcagtcaaagtgctatgccttaccaacttggctaattcccaattattaacaaaggctctctaacaagaacccttgatgatagagggtattaatcagtgcggtatgagttaataataacaaataattcttaaagcatatttaccatttatgatgatacgtatttacgatacattcaagacccaaaggattcttgaaaatatcatattcaagaggacctttttctgtttcaataaagaaatcaaaatttactgtattaaatttacggtcttcctttactaatttaacttgagaagatgaacgatcaatgtaaaccttttcaacttcaaaacacgttaaaatgccataatcatcaatcaaggctttagctgcttcttgatcatatttatatccattttcaacggatgatactttcgcataaagaatcatcatcaacctctatcaacaatagcatgagtatgggcatttacgatttgccaccagtcgaaacgattggaaccataatctggtttattttcattttctttaatgatatcacgcagtttatcttctgtttcagcatacgcaattaaatcatcatatccaccacaaggataataattatcacctgcgaataaaagaaaatttaccttagatggatttacgtaataatggtctttaggatatttagttcctctccaatcagttacttcaacataacggtaagaaaatccatttttactttcaatccaactccacgcttcaaaaggagtattaaaaactttatcaggtattaaattaccttcaaaatgagaaggatttgcataatccccggcataaacataatattcgttaatactcatttattcacctttagaaattttatccataacgatagcaattaaaccaattaaaaatgctactacaagtgaaaacacattttctgctgtagttaataatccgcatataaatccaacaaacattgaaaaactaaaagcagaagcagaaattgcaatagcaacatttcgaattaattcacagcgtttcattttattctcctcagtagttgatagggtaatagtatcacagctaaaaccctatgtaaacaactttgtgaaatatttattacaaaagatttttagcaataatcttgagatgtgccgcagaaatgtgtttagctttaaacaacgcagtttcttcagcaggagagataacgattgtagcaccatcctttttagcagaccacccatcacctaggtaaacagtacctttgatttcttcgccatcaaccagactaatcattggtttaccttctcgtcctttatttgctttaataacttcagaagtaagagtagcttcggtaatggtagaaaccggggtagttgtagaagtaaattctttaaatgttttcatttttattttcctaattaattttgatgaggtaatagtatcactacctcatcagtatgtaaacaactttgtgaaattattttaaatcatctgcccaatcgagtttaagaggctctttgtattcacgatctaatacgaccggaatttgtacatcaccgctaaatgataagggcccaacattataagacaatgttatatgcggtgtgtaatcatcaaaatcatgtgtagcacctagtgcccgcgcatacatgtgtcgacagcgcagatattcagaatctagcacaagtacaagagtcgatccatcttgtgttttccatacttctaaatgtccagaagaagctacttcaaaacttccactcgatggaacatatggaacatttactcttgaataacatatagtcgaatgaattttttctctaggaactggattaggaacacgtaaagagcgctgaagttcttccagcgcatcaagtgttaattctgaaaacttagctgctacataaagacccgttgaaaagtctttaaattccatcattcttcatcttttgcttcatctgcagattcagcagtaagatttttgacagcttcaacgatttcttcaactttgatagtatcgccagtgatacctactgcacgagcaatttcagccaaagttccttgcagaattttggattcttccatcagacgagcagcttgatcctgcgtatcaagaatgcgagatttcagagttacgatttcagcagacagtttttgttcaacagtttgttcagacattatagtacctttagtgtatttttaattttagaaaaaagttcttcaagagaaccatcgtttgtaattactaaatcgccatcacgaattggcaatccagcttctgtaatatgtgtatcattggatttttgaccaggacgaactacatgaattactgtagcacccatcgccctagccgcatccatttcatgatcttgacgggtatcaggaacgatataataatcataacctgagttaaatttatcaagataatctaaagcaaataattttacccagtacatgcggtcgaagttattaacaatcaaatccgtacctagggcttgcatcagacgacggactgaccattgatcttcaatattatttataacgtcagtaatcttattaaatgctacgaaattaactgattcttttccttcgtcatcaaaaacaaacacacctttaattgggcttttaccattaagataacaaaatgcttgttccataatcgtgattacttctaatttagtcagatttaaattagtctcacgatcatagtcaattccttcaaactctttacgagttaagcaaggatagtcagtgtttgctgcaaatactccccatgcataagccaatgcatccttaataggaccagcaagttggtatttaactgcagaataattgctcatgataaaatcagcagtagtatcttttccactacgctttacaccgcttaaaaagattagtttcatgtgtttctcctcaaatttaattaagattataacacacaaaactgaagcattaaacttctgctataattttaccatctttttctacttgaaaataggtgtaaggaattgttgcagtacatactaaagccgggtctgaatcttccgtgtagctaaattctacttcagataggtcagaaacccaaggcttataaaaatttattgacatcacgatttcagttttgctattatctaagatgtaaagcgtaatgtactcaggacctgttttttgggcagtattttcacctgtaagatagttgctagttcctagcatccattcatacattcctatccacgacttaagttcttcatcaactataaatctcacaatgagtggatcatactcaaatgtaacacctggacgttgtgctcggcccagtccaaacggcccagtcacggtatcagtaacaggtattctaattcctggaataggaactgactgagcatttaaagtaaaagcagatgtagtattactatgtggtattgatactacaaagttagttgtatttgcttggttaaaaatttgttgcagagcttgcgacatatattcctcataatgctttataactgttggtggtataatgggtctaagtcccttccattcaattccatttagaacaaacaacagaaaagaatggaagataatagaattagatatttgaccagactttgtttgcagagaaacgttttccttttgaaacgaactgctgaagtggcatcaacacaacgttcgcccagtctttcggggcgatttcaacaaggctacccataatattaccaggtatatatgccttaatcatttggtctgcacccctaaatcctttcacttgactccaatcaatttttaatttcgttttattagtaatagtaggtgtatttgcatattgctttaaaagctcttctaggaattgctgacgagctttaggtggaatatagtgcaagtttaatccgtacattaaattatgcttacctaaaccaaggtaaattatcaaaggaaatttatcccagtaaggaagagtttccttgtgtttagcatcataagcaaaagcatatattcgtcccggctgcgggcgaacaactttatgtccttttacttgcttaatagtttcagcaaaccactttctggttttattattaattgctgcgccttcattacgaattttatcacgcaatgtttgtctgaatgaatttatcataagcagttgtctttcttgcttattgagtttattcattggttttgattcaagtttttgaatcttttcagccgttttaattcctgaagcatattttgacattgctgaagtaaacgtagagtatttgattcctctttcttcagcaaattgctttcctgtcattccttttgctttggcctttttatattcaagacctatctgaatccatttcttttcgtttaatgattgcttaacctttggaacttggggagtgctttcattaattatttgaaaaatagccattatgcccccttaaagccaagagctcgtaatccatcttctgttagaattctaaattttattccacgcttttcagctaaagattgtgctgctttccatttgtcagtgttcacagaccaggtataaatttcattcataaatcttttcttcgctgcggtcgttagatgtgctggtttaactggtggttgtgtttcttttttaggttttatttcaataaaaaattcttgtccagaagaatctttcatccaaatatccatgaagtatctacgttttttcccttctgcattacaaaaataaggaattactgctgtttcactaccccatgcaataatttctggatttttatctaaccattcaaaaaagaatttttcccaatttgatctatacgtaatttttttagggtcacctctatactttgatatatttttaggaacccattttccagaatatgccattggattctccttataaatagataatatatttataaacaggagggcccatgctctttacattttttgatccgattgaatatgcggccaaaacggtgaataaaaacgcgccgactattcctatgacagatatttttagaaactataaagactattttaaacgcgctcttgcgggataccgcttacgtacttattatattaaaggttcaccacgcccggaagaattagcaaatgctatatatggaaatccacagctgtattgggttttattgatgtgtaatgataattatgacccgtattatggatggattacttcgcaagaagctgcttatcaagcatctatacaaaaatacaaaaacgtaggtggagaccaaatagtatatcatgtgaatgagaacggtgaaaaattttataatttaatatcatacgatgataatccatatgtttggtatgataaaggcgataaagctagaaaatatcctcaatatgaaggagcgcttgctgcggtcgatacgtatgaagctgctgttcttgaaaatgaaaaacttcgtcaaataaaaataatagcaaaatcagacatcaattcatttatgaacgaccttatacgtataatggagaaatcttatggaaatgataagtaataaccttaattggtttgtcggtgttgttgaagatagaatggacccattaaaattaggtcgtgttcgtgttcgtgtggttggtctgcatccacctcaaagagcacaaggtgatgtaatgggtattccaactgaaaaattaccatggatgtcagttattcaacctataacttctgcagcaatgtctggaattggaggttctgttactggaccagtagaaggaactagagtttatggtcattttttagacaaatggaaaactaatggaattgtccttggcacgtatggtggaatagttcgcgaaaaaccgaatagacttgaaggattttctgacccaactgggcagtatcctagacgtttaggaaatgatactaacgtactaaaccaaggtggagaagtaggatatgattcgtcttctaacgttatccaagatagtaacttagacaccgcaataaatcccgatgatagaccgctatcagagattccgaccgatgataatccaaatatgtcaatggctgaaatgcttcgccgtgatgaaggattaagattaaaagtttattgggataccgaaggatatccgacaattggtattggtcatcttatcatgaagcagccagttcgtgatatggctcaaattaataaagttttatcaaaacaagttggtcgtgaaattacaggaaatccaggttctattacaatggaagaggcgacgactttatttgagcgtgatttggctgatatgcaacgggacattaaatcacattctaaagtaggaccagtctggcaagctgtcaaccgttctcgtcaaatggcgttagaaaatatggcatttcagatgggtgttggtggtgtagctaaatttaacacaatgttaactgctatgttagcaggagattgggaaaaagcgtataaagccggtcgtgattcattgtggtatcaacaaacaaaaggccgtgcatcccgtgttaccatgattattcttacggggaatttggaatcatatggtgttgaagtgaaaaccccagctaggtctctatcagcaatggctgctactgtagctaaatcttctgaccctgctgaccctcctattccaaatgactcgagaattttattcaaagaaccagtttcttcatataaaggtgaatatccttatgtgcatacaatggaaactgaaagcggacatattcaggaatttgatgatacccctgggcaagaacgatatagattagttcatccaactggaacttatgaagaagtatcaccatcaggaagaagaacaagaaaaactgttgataatttgtatgatataaccaatgctgatggtaattttttggtagccggtgataaaaagactaacgtcggtggttcagaaatttattataacatggataatcgtttacatcaaatcgatggaagcaatacaatatttgtacgtggagacgaaacgaaaactgttgaaggtaatggaactatcctagttaaaggtaatgttactattatagttgaaggtaatgctgacattacagttaaaggagatgctaccactttagttgaaggaaatcaaactaacacagtaaatggaaatctttcttggaaagttgccgggacagttgattgggatgtcggtggtgattggacagaaaaaatggcatctatgagttctatttcatctggtcaatacacaattgatggatcgaggattgacattggctaatatacttccaatgagcgctgatttaggagaatccatggaaggttcttctatcgacgtcacctttaccgctcaattagaaacaggtgaaacgttagtatctataaatataactagttacgaagaaactcctggggttttagtagaagaaaatcgcttatatggaacatatgaatctgtatttggtttcggaaatgacgcgttgaaatatcgtttaggcgatgaatttaaaactgctgcttcatgggaagaacttcctactgattctgatactcagttgtatttgtggaaagctcctcaaaacctccagaagacattcacttacgaagtaacattaatatatgactaccaagaacaaagtgaatctgggggttctggcagtaattctaggtcatcttctgatactactgaaccgacagatcctcctgctccagtaagaaaaactctagttaaaaattatactaaaactatagttggaaattggagtcgttgggctaataaactgagaaaatatgcctatgcaagaccataaatatttttatttgtattcaataactaataaaacaacagaaaaaatttatgtaggcgtccacaaaacttcaaatttggatgatgggtatatgggttctggcgttgccattaaaaatgccattaaaaaatatggcatagataatttttataagcatattataaaattctttgaatctgaaaaagctatgtatgacgcagaggcagaaatagtcacagaggaatttgttaaatctaagaaaacttataatatgaaactaggcggtatcggtggcttcccaaaacataacacagcgggtgctaaaaatggattttacggtaaatctcattcgcgtgaaactagattgaaaattagcattaaatcgtctagaaaaagagggcctagagggctagaggtaaaactctgaagatgtgtggcgccaataacccaaggtatggcaaaatagcccctaatgctaaatctgttattatcaacggcgttttatataaaagtattaaaatcgcagctaaagctcttaatataaattatagtaccttaaaggggcgagttaaagcggggtattataaatgtcaggattaagttatgataagtgtgttactgctggccatgaagcgtggcctccaacagttgtgaatgctacacaaagtaaagtattcactggaggaattgctgttctcgtagcaggcgatccaattacagaacatacagaaattaaaaagccgtatgaaacacatggcggagtgacacaacctagaacttctaaggtatatgtcactggaaagaaagctgttcaaatggctgatccaatatcatgcggtgatactgtggctcaggcatcatctaaagtattcattaaataggatttaaaatggcaaatacccctgtaaattatcaattaacaagaacagcaaatgctattcccgagatattcgtcgggggtacatttgctgaaataaaacaaaacctcattgaatggcttaatggccaaaatgaatttttggattatgattttgaaggctcaagattaaacgttctgtgtgaccttttagcttataatacattatacattcagcagtttggtaatgctgctgtgtatgaaagctttatgcgtactgctaacttacgaagttcagttgttcaagctgcacaagataacggatatttacctacttcaaaatccgctgcgcagaccgaaattatgttaacatgcactgacgcattgaataggaattacattactattcctcgcggaactcgctttttagcatatgcaaaagatacttctgttaatccatataacttcgtttctagggaagacgttattgctattcgtgataaaaataaccaatattttccgcgtttaaaattggcccagggacgtatagtaagaactgaaatcatttatgataaattaacacctattatcatttatgataaaaatattgatagaaaccaggttaaattatacgttgatggagcggaatggattaactggacgagaaagtcaatggttcatgctggttcaacatcaacgatttactatatgcgtgaaactattgatggaaacactgaattctattttggtgaaggtgaaatttctgttaatgcttctgaaggagctttgaccgctaattatatcggaggtcttaaacctactcagaactctacgattgttattgagtacattagtactaatggtgctgacgcgaacggagcagtcggattttcatacgcagatacattaacaaatataactgtcatcaatattaatgaaaatccaaacgatgatccagattttgttggggcagatggaggcggtgatccagaagatattgagcgtattcgcgaattgggtactattaaacgcgaaacccaacaacgatgcgtaactgcgactgactatgatacattcgtttcagagagatttggttctattattcaagctgttcagactttcactgattctactaaacctgggtatgcatttattgctgctaaacctaaatcaggattgtatttaactaccgtacagcgtgaagatattaaaaattatctcaaagactataatttagctcctattacgccatcaattatttctcctaattatctttttattaagactaatttaaaagtcacatatgctttaaataaactgcaagaatccgaacagtggcttgaaggtcaaataattgataaaatagatcgctattataccgaagatgtagaaatttttaactcgtctttcgctaaatctaagatgttgacatatgtagatgatgcagatcattctgtcattggttcatcagcgactattcaaatggttcgtgaagtacaaaacttctataaaacgcctgaagcgggtattaaatacaataatcaaataaaagatcgttctatggaatctaatacgttttcatttaattctggacgaaaggttgtaaatcctgatactggtttagaagaagatgtattatatgacgttcgtatagtatcaacagaccgagattctaaaggaattggtaaagttattattggtccatttgcttctggcgatgttacagaaaatgaaaacattcagccgtatacaggcaacgattttaacaaattagcaaattctgatggacgcgacaaatactatgttatcggtgaaataaattatccagctgatgtgatttattggaatatcgctaaaattaatttaacatctgaaaaatttgaagttcagaccattgaattatattctgacccaaccgatgatgttatctttactcgcgatggttcactgattgtatttgaaaatgacttacgtccacaatacttaactatcgatttggagcctatatcacaatgacagtaaaagcaccttcagtcactagtctcagaatttccaagttatccgcaaatcaggtgcaagtacgctgggatgacgttggtgctaatttctactattttgtagaaatcgctgagacaaaaacaaactcgggggaaaatctcccgagtaatcaatatcgttggattaatttaggatatacagcaaataatagtttcttttttgatgatgctgatccattaacaacatacattattagagtagccacagctgcgcaagattttgagcagtctgattggatttataccgaagagtttgaaacttttgctacaaatgcttatacatttcaaaacatgattgaaatgcaattagccaataaattcattcaggaaaaatttactcttaataattctgattatgttaattttaataatgatactataatggctgcattgatgaatgaatcattccaattcagcccatcgtatgttgatgtttcatcaataagtaattttattattggtgaaaatgagtatcatgaaatacaaggttctattcagcaagtatgtaaggatattaaccgagtttatttgatggaatcagaaggaattctatatctttttgagcgctatcaacctgtagttaaagtatccaatgataaaggacaaacctggaaagctgtaaagctcttcaatgaccgtgtaggatatcctttatctaagacagtatattaccaatctgcgaacacaacatacgttctaggatacgacaagattttctatggccgcaaatctactgatgttagatggtcagccgatgatgtcagatttagttctcaggatataacatttgctaaacttggcgaccaattacatctaggatttgatgtagaaatttttgccacttacgcgactttaccagcgaatgtataccgcattgcagaagctattacttgcaccgatgattacatttacgttgtcgccagagacaaagttagatacataaaaacgagtaatgcacttatagattttgatccattatctccaacatattcggaaagactttttgaacctgataccatgactataaccggaaatcctaaagcagtatgctataaaatggattctatctgtgataaagtttttgctcttattattggtgaagttgaaacattaaatgctaatcctagaacatcaaaaataattgattccgctgataaaggaatatatgttttaaatcatgacgaaaaaacatggaaaagagtttttggtaataccgaagaagaaagaagacgtattcaacccggatatgcgaatatgtcaactgacggtaaattagtttctctgtcttcgagtaattttaaatttttaagtgataatgttgttaatgaccctgaaactgcagcaaaatatcagttaattggcgctgttaaatatgaatttcctcgtgaatggttagctgataagcattatcatatgatggcatttatagcggatgaaacatctgattgggagacttttactcctcaaccaatgaaatactacgcagaaccattctttaactggtctaaaaaatctaacacacgttgttggataaacaactctgatagagctgtggtagtttatgctgatttaaaatacactaaagttatagaaaatattccggaaacatcaccagatagattagttcatgaatactgggatgatggtgattgcactatagtaatgccaaatgtcaaattcactggatttaaaaaatacgcatcaggaatgcttttctataaagcctccggtgaaataatttcttactatgattttaactatcgtgtgagagatacagtagaaattatttggaagccaactgaagtatttttaaaagcatttttacaaaaccaagagcatgagactccttggtcaccagaagaagagcgtggattagctgaccctgatttaagaccattaattggcacaatgatgcctgattcttatttgttacaggattcgaattttgaggcattttgcgaagcatatattcagtatctttctgatggatatggaactcaatacaataatttacgaaatttaattcgtaaccaatatccacgagaagagcacgcatgggaatatttgtggtcagagatatataaaagaaacatttatttaaatgctgataaacgcgatgctgttgcgagattctttgaatcacgtagctatgatttttattctactaaaggaattgaagcatcatacaagtttctttttaaagttctttataatgaagaagttgaaattgaaattgaatctggggctggtactgaatatgatataatcgttcaatctgattctttgactgaagatttagtaggacaaacgatttatacggcaacaggaagatgtaatgttacttatatagaaagaagctattctaatggtaaattgcaatggaccgtaactattcataatcttttgggacgattaattgctggtcaagaagttaaagcagaaagactccctagttttgaaggcgaaattattcgtggggttaaaggaaaggatttgcttcaaaacaatatagactatattaatagaagtagatcatactatgtaatgaaaattaaatccaatttaccttcttcccgctggaaatctgacgttattcgttttgttcatccagtaggatttggatttatagcaattacccttttaacaatgtttattaatgttggtttaactcttaaacatacagagactataattaataaatacaaaaactataaatgggattctggattgcctactgaatatgccgacagaatagctaaattaactccaaccggtgaaattgagcatgattcagtaacaggcgaagcaatttatgagcctggcccaatggctggtgtaaaatatcctcttcctgatgactataatgctgaaaataataattcaatatttcaaggtcaattgccgtctgaacgacgtaaattaatgagtcctttatttgatgcatctggaacaacatttgcgcaatttagagatttagttaataaacgtctaaaagataatataggaaatccaagagaccctgaaaatccaacacaggttaaaatagatgaatgattcaagtgttatctatcgtgcgatagttacttcaaaatttagaacagaaaaaatgttgaatttttataattcaattggaagtggtccggataaaaacactatctttatcacatttggaagatcagaaccgtggtcatcaaatgaaaatgaggtgggctttgccccaccttatccaaccgattctgtattaggcgtaactgacatgtggacgcatatgatgggaacagtaaaagttcttccatcaatgcttgatgctgttattcctcgcagagattggggagatactagatatccggatccatacacatttagaattaacgatattgtagtgtgtaactcagctccttacaacgctactgaatcaggcgctggttggttagtgtatcgttgtttagatgttcctgataccggaatgtgttcaatagcatctttaactgataaagatgaatgccttaagttaggtggaaaatggactccttctgctaggtcaatgactccgcctgaaggtcgaggagatgctgaaggaacaattgaacccggagacgggtatgtgtgggaatatctatttgagattccgcctgatgtatctataaatagatgcacgaatgaatatatcgtggttccttggcctgaggaattaaaagaagacccgactagatggggatatgaagataatctcacttggcaacaagatgattttggattaatttaccgtgttaaggcaaatactatccgttttaaagcatatttagattcagtttattttcctgaagctgcattaccaggaaataaaggatttagacaaatatcaataatcacgaatcctcttgaagctaaagctcatccaaatgacccaaacgttaaagctgaaaaggattattatgacccagaagatttaatgaggcattcgggtgaaatgatttatatggaaaataggccacctattattatggcaatggatcaaacagaagaaatcaatattctgtttacattttaaattaagggagcccatgggctccctttttctttataaatactataaactcataaggaaaccgctatgttcattcaagaaccaaagaaattgattgataccggcgaaattggtaacgcttctactggtgatatcttattcgacggtggtaataaaattaatagtgattttaacgcaatttataatgcgtttggcgatcagcgtaaaatggcagtagcaaatggcactggagcagatggtcaaattatccatgctactggatattatcaaaaacactctattacagagtacgcaactccagtgaaagttggcactagacatgatattgatacctctactgtaggtgttaaagttatcattgaaagaggcgaactcggcgattgtgttgaattcattaactctaatggatcaatatcagttactaatcctttgacaattcaagctattgattcaattaaaggtgtttcaggtaatttagtagtaactagcccatatagtaaagttactttacgctgtatttcatctgataattctacgtcggtttggaattattctattgaaagtatgtttggacaaaaggaatcaccagctgaaggtacatggaatatttctacatctggatcagttgacattccattatttcatcgtactgaatacaatatggctaaattgctagttacgtgccaatcggtagatggaagaaaaattaaaacagcagaaataaatattcttgtggatactgttaattcagaggtaatttcttctgaatatgctgtcatgcgagttgggaatgaaaccgaagaagacgaaatcgctaatattgcatttagtattaaagaaaattatgtaacggcgactataagttcttcaactgtcggtatgagagcagcagttaaagttatcgctacgcagaaaatcggggtggctcaataatgaaacaaaatattaatatcggtaatgttgtagatgatggtaccggtgactacctgcgtaaaggtggtataaaaataaatgaaaactttgatgagctttattatgaactcggtgatggtgatgttccatattcagccggtgcctggaaaacttataatgcttcatcaggacaaacattaacagcagaatggggaaaatcatacgctattaatacatcttctggaagagtgactataaatcttccaaagggtacagttaatgattacaacaaggtaattagagctagagacgtatttgctacatggaacgtcaacccagttacactagtagctgcttccggcgatacgattaaagggtctgcagtaccagttgaaattaatgttcgattcagcgatttagaactagtgtattgtgccccaggacgttgggaatatgtcaaaaataaacaaattgacaaaattaccagttcagacattagtaatgtagctcgcaaagaatttttagttgaagttcaaggacaaacagactttttagatgttttccgtggaactagttataatgtaaataacatcagagtaaaacatcgtggtaacgaattgtattacggcgatgtgtttagcgaaaacagcgattttggctctccaggcgaaaatgaaggagaactggttcctcttgatggatttaacattcgattaagacagccttgtaatattggtgacactgttcaaattgaaacatttatggatggtgtatcacagtggagaagttcatatacaagacgtcaaattagattgttagattcaaaattaacgtcaaaaacttctttagaaggaagcatttacgttactgatttatcaacaatgaaatcaattccattttctgcttttggattaattccaggagaacctattaatcctaactctcttgaggttcgttttaacgggattttacaggaattggctggcacagttggaatgccattatttcattgtgttggtgccgattcagacgatgaagtagaatgctctgttttaggtggaacttgggaacaatctcataccgattattcagttgaaactgatgaaaacggcataccagaaattttacatttcgatagcgtatttgagcatggtgacattatcaatatcacctggtttaataatgatttgggtacattattaacaaaagatgagattattgatgaaactgataatctctatgtatcgcaaggacctggagtagatatttctggtgatgtaaatttaacagacttcgataaaattggttggccaaatgtagaagcagttcaatcttatcaacgcgcatttaatgctgtttcaaatatctttgatacgatttatcctattggaactatatatgaaaacgctgttaatccaaataaccctgttacatatatgggattcggctcatggaaattatttgggcaaggaaaagttttagttggatggaatgaagatatttcggaccctaactttgctctaaataacaacgatttagattcgggtggaaatccttcacataccgcaggtggaacaggtggttctacttctgttacattggaaaatgctaatcttcctgcaactgaaacagatgaagaagttctaatagttgatgaaaatggatcagtcattgttggtgggtgtcaatacgatccagatgaatccggtccaatttacactaaataccgtgaagctaaagcatctactaactctactcacactccgccaacatcaataactaacattcaaccatatattacagtttatcgttggataaggattgcataatgagtttacttaataataaagcgggagttatttcccgcttagccgattttcttggttttagacctaaaactggcgacattgatgtaatgaatcgtcaatcagtcgggtcagtgacaatatctcaattagcgaaaggattttatgaaccaaacatagaatcagctattaatgacgttcataatttttctataaaagacgttggcacaattattactaataaaactggtgtttctcctgagggtgtttctcaaactgattattgggcattttctggaactgtaacagacgattctcttcctccgggttctcctattacggtattagtatttggtcttccagtttcagcaacaactggaatgacggcaattgagtttgttgcaaaagttcgcgttgcactacaagaagctattgcgtcatttactgctatcaattcatataaagaccatccaactgatggtagtaaattagaagttacttatttagataatcaaaaacatgtattaagcacatattctacatatggaataactatttcccaagaaattatatctgagtctaagcctggctatggtacatggaatttattgggcgcacaaactgtaactttagataatcagcagactcctacagtattttatcattttgagagaacagcatgagtaataatacatatcaacacgtttctaatgaatctcgttatgtaaaatttgatcctaccgatacgaattttccaccggagattactgatgttcacgctgctatagcagccatttctcctgctggagtaaatggagttcctgatgcatcgtcaacaacaaagggaattctatttattcccactgaacaggaagttatagatggaactaataataccaaagcagttacaccagcaacgttggcaacaagattatcttatccaaatgcaactgaaactgtttacggattaacaagatattcaaccaatgatgaagccattgccggagttaataatgaatcttctataactccagctaaatttactgtcgcccttaataatgcgtttgaaacgcgagtttcaactgaatcctcaaatggtgttattaaaatttcatctctaccgcaagcattagctggtgcagatgatactactgcaatgactccattaaaaacacagcagttagctattaaattaattgcgcaaattgctccttctgaaaccacagctaccgaatcggaccaaggtgttgttcaattagcaacagtagcgcaggttcgtcagggaactttaagagaaggctatgcaatttctccttatacgtttatgaattcatcttctactgaagaatataaaggcgtaattaaattaggaacacaatcagaagttaactcgaataatgcttctgttgcggttactggcgcaactcttaatggtcgtggttctacgacgtcaatgagaggcgtagttaaattaactacaaccgccggttcacagagtggaggcgatgcttcatcagccttagcttggaatgctgacgttatccagcaaagaggtggtcaaattatctatggaacactccgcattgaagacacatttacaatagctaatggtggagcaaatattacgggtaccgtcagaatgactggcggttatattcaaggtaaccgcatcgtaacacaaaatgaaattgatagaactattcctgtcggagctattatgatgtgggccgctgatagtcttcctagtgatgcttggcgcttctgccatggtggaactgtttcagcgtcagattgtccattatatgcttctagaattggaacaagatatggcggaaacccatcaaatcctggattgcctgacatgcgtggtctttttgttcgtggttctggtcgtggttctcacttaacaaatccaaatgttaatggtaatgaccaatttggtaaacctagattaggtgtaggttgtaccggtggatatgttggtgaagtacagatacaacagatgtcttatcataaacatgctggtggatttggtgagcatgatgatctgggggcattcggtaatacccgtagatcaaattttgttggtacacgtaaaggacttgactgggataaccgttcatacttcaccaatgacggatatgaaattgacccagaatcacaacgaaattccaaatatacattaaatcgtcctgaattaattggaaatgaaacacgtccatggaacatttctttaaactacataattaaggtaaaagaatgacagatattgtactgaatgacttaccattcgttgacggccctcctgcagagggccagagccgcatttcctggattaaaaacggcgaagaaatattaggagctgacacacagtatggaagtgaaggctcaatgaatagacctacggtttctgtactaagaaatgttgaagttcttgataaaaacattggaatacttaaaacatctttagaaaccgcaaatagtgatattaaaacaattcagggcatcttagatgtatctggtgatattgaagctttggcccaaataggtatcaataaaaaggatatttctgacctcaaaacgctaaccagtgaacacacagaaatattaaatggaactaataatacggttgacagtattcttgccgatattggtccatttaacgccgaggccaactctgtatacagaacgatcagaaatgatttactgtggataaagcgtgaacttggacaatacactggtcaagatattaatggtcttcctgttgtaggaaatcctagtagtggaatgaagcatcgcattattaataatactgatgtcatcacttcgcagggaatacgtttaagcgaattagaaacaaaatttattgaatctgatgtaggttctttgaccattgaagttggtaatcttcgtgaagagcttggaccgaaaccaccatcattttcacagaacgtttatagtcgtttaaatgaaattgacactaaacagacaacagttgagtctgacattagtgctattaagacctcaataggatatccaggaaataattcgattatcacgagtgttaatacaaacactgataatattgcatctattaatttagagctaaatcaaagtggaggtattaaacagcgtttaaccgttattgaaacttccattggttcagatgatattccttcgagtattaaaggtcaaatcaaagataatacaacttcaatcgaatctctaaatggaatcgtcggtgaaaacacttcatctggcttaagagcgaatgtttcatggttaaaccaaattgttggaactgattctagcggtggacaaccttctcctcctgggtctcttttaaaccgagtttctacaattgaaacttctgtttcaggcttgaataacgctgttcaaaacctacaagtagagattggtaataacagcgcaggaattaaagggcaagttgtagcgttaaatactttagtaaatggaactaatccaaacggttcaactgttgaagagcgcggattaaccaattcaataaaagctaacgaaactaacattgcatcagttacacaagaagtgaatacagctaaaggcaatatatcttctttacaaggtgatgttcaagctctccaagaagccggttatattcctgaagctccaagagatgggcaagcttacgttcgtaaagatggcgaatgggtattcctttctacctttttatcaccagcataacatggggccgcaaggccccaaaggattttaaatgtcaggatataatcctcagaatccaaaggaactcaaagatgtcattctaagacgtttaggggctccaattattaatgttgagttaacacccgatcaaatttacgattgtatccagcgtgccctagaattatacggtgaataccattttgatggactcaataaaggttttcatgttttttatgtaggggatgatgaagaaaggtacaagaccggagtcttcgatttaagaggttctaacgtatttgcagtaacccgcattttacgcacaaatattgggtcaataacatctatggatggaaacgctacatatccgtggtttactgactttcttttaggaatggctggtattaatggcggaatgggaacgtcttgtaatagattttatggaccaaatgcctttggagctgatttaggatattttacccagcttaccagttatatgggaatgatgcaagatatgctctctcctattccagacttttggtttaattcagcaaatgaacagctcaaagtcatgggaaacttccaaaaatatgatttaattatcgtagaaagctggactaaatcatacattgatacaaacaaaatggttggaaatacagtaggatatggaacagtcggtccacaagatagctggtcattatctgaacgatataataacccagaccacaatttagtaggtcgtgttgtcggccaagatccgaatgttaaacagggtgcttataataatcgttgggtgaaagactatgcaacagctttagctaaagaattgaacggtcaaattttagcacgccaccaaggtatgatgcttccgggcggtgttacaattgatgggcagcgcttaatagaagaagccagattagaaaaagaagcactgcgcgaagaattatacttacttgatcctccatttggaattttggtaggttaatatggctacttatgataaaaatctttttgctaaattggaaaaccgcacaggttattctcagaccaatgaaactgaaatattaaatccttatgtaaatttcaatcattataaaaacagccaaatattagctgatgtattagtagctgaaagcattcaaatgcgaggtgtagaatgctattatgttccaagagagtatgtttcccctgatttgatattcggcgaagacttaaaaaataaatttactaaagcttggaaatttgctgcatatttaaattcatttgaaggatatgaaggagctaaatcgttctttagtaactttggtatgcaagtacaagacgaagtgactttatctattaacccaaatttatttaagcatcaagttaacggaaaagaacccaaggaaggtgatttgatatattttcctatggataacagcttatttgaaattaactgggttgaaccatatgatccattttatcaattaggccaaaacgctattcgtaaaattacggcaggtaaattcatttattctggagaagaaattaatccagttctacagaaaaatgaaggaattaacattccagaatttagtgaattagaattaaatgctgttcgcaatcttaacggtattcatgacattaatattgatcagtatgctgaagtagatcaaattaattctgaagctaaagaatacgttgaaccttatgttgttgtcaataacagaggcaaatctttcgaatctagcccatttgacaatgatttcatggattaataaatattataaactaattaaagcccggattaggagaagtcatgtttggttatttttataattcgtcttttagacgatatgctaccttgatgggcgatttgttttcaaatatccaaatcaaacgtcagttagaatctggtgataagtttatacgtgttcctattacgtatgcatcaaaggaacactttatgatgaaattgaataaatggacatcaataaattcacaagaagatgtagctaaagttgaaactattctacctcgtataaatttacatttagttgattttagctataatgctccatttaaaacaaacattttaaatcagaatttactgcaaaaaggtgcaacttctgtagtatcgcagtataatccatctcctattaaaatgatttatgaattgagtatctttactcgctatgaagatgatatgtttcaaatagttgaacagattcttccatattttcaacctcattttaatacaactatgtacgagcagtttggaaatgatattccatttaaaagggatattaaaattgtactgatgtctgctgctatagacgaagctatagatggggataatttatctcgtcgtagaattgaatggtcattaacatttgaagtaaatggatggatgtatcctccagtagatgatgcagaaggattaattcgtactacttatacagattttcacgccaatacaagagatttgcctgacggcgaaggtgtttttgaatctgtcgatagcgaagttgttcctcgagatattgacccagaagactgggatggaacagtaaaacaaactttcactagtaatgtaaatagaccaacaccgccagaacctcctggcccaagaacatagaggttattatggaaggtcttgatataaacaaacttttagatatttctgacctccccggaattgacggggaggaaatcaaagtgtatgaacctctgcaattagtagaagttaaaagcaatccacaaaaccgtactccagacttagaagatgattatggagtagttcgtcgaaatatgcattttcagcaacaaatgctaatggacgctgccaagatttttcttgagacagcaaagaatgctgattctcctcgtcacatggaagtatttgcaactcttatggggcaaatgactacgacgaacagagaaatactgaagcttcataaagatatgaaagacattacatctgagcaggttggcaccaaaggcgctgttcctacaggtcaaatgaatattcagaatgcgacagtattcatgggttcaccaacagaattaatggacgaaattggtgatgcttacgaggctcaagaagctcgtgagaaggtgataaatggaacaaccgattaatgtattaaatgatttccatccgttaaatgaagctggaaaaattttaataaaacacccaagcttagcggaaagaaaagatgaagatggaattcattggataaaatctcagtgggatggaaaatggtatcctgaaaaattcagtgattaccttcgtctacacaaaatagtaaaaattccaaacaactctgataagcctgaattatttcaaacttataaagataagaataataaaagatctcggtatatgggtcttcctaacttgaaacgagctaatattaaaacacaatggactcgtgaaatggttgaggaatggaaaaaatgccgagatgatattgtttattttgcagaaacatactgtgccattactcatattgactatggtgtcataaaggttcaattacgtgactatcagcgtgatatgctcaaaataatgtcatctaaacgtatgactgtttgtaatctatcgcgccagctcggtaaaaccaccgtagtagctattttccttgcacactttgtatgttttaacaaagataaagctgtaggtattcttgcacacaaaggctcaatgtctgcggaagttttagaccgtactaagcaagcaattgaactgcttcctgactttttacaaccaggaattgttgaatggaataagggttcaattgaactagataatggttcttcaattggcgcttatgcttcctctcctgacgcagttcgtggtaactcgttcgcaatgatttacattgacgaatgtgcgtttattccaaacttccatgattcctggcttgctattcaaccagtaatttcatctggtcgtcgttcgaaaattattattactacgactcctaatggattaaatcatttttatgatatttggactgctgctgtcgaaggtaaatctggatttgaaccatatactgctatttggaattcagttaaagaacgtctttataacgatgaagatatttttgacgatggatggcaatggagcatacaaaccattaatggttcttcattagctcaattccgtcaagaacatactgcagcgtttgaagggacttctggtacattaatttcaggaatgaaattagctgttatggattttattgaagtaacaccagatgatcatggttttcaccaatttaaaaaacctgaaccagatagaaaatatattgcaactctagattgctcagaaggtcgtgggcaagattaccacgctttgcatattattgatgttactgatgatgtgtgggaacaggttggtgttttgcattcaaacactatttctcatttaattctacctgacatcgttatgcgttatttagtagaatacaatgaatgcccagtttatattgaattaaatagtactggtgtgtcagttgcaaaatcgctttatatggatttagaatacgaaggtgttatctgcgattcatatactgatttaggaatgaaacaaactaaacgcacgaaagcagtaggatgttccacgctaaaagaccttattgaaaaagataagcttattattcatcaccgagcgactattcaagaatttagaacgtttagtgaaaaaggcgtgtcttgggcggctgaagaaggttatcatgacgatttagtaatgtctttagtgatttttggatggttatcaacgcagtcaaaatttattgattatgcggataaagatgacatgcgattagcatctgaagtattttcaaaagagcttcaggatatgagcgacgactacgcgccagttatatttgtggattcggttcattctgctgagtatgttccagtatctcatggtatgtcaatggtataaatatattaaagcatattaaagaggattaaaaatgactttattatctccgggcattgagctcaaagaaactacggttcaaagcaccgtagttaataactctactggtacagcagctttggccggtaaattccagtggggtcctgcttttcagattaaacaggttacaaatgaagtagatttagttaatacttttggtcaaccaaccgctgaaactgctgactattttatgtctgcgatgaatttcttgcagtacggaaatgacttacgagtagttcgtgctgttgatagagataccgctaaaaactcatcgccaattgctggtaatattgattacacaatttctaccccaggtagtaactatgcggttggagataaaatcacggtcaaatatgtttcagatgatattgaaactgaaggtaaaattactgaagtagacgcagatggaaaaattaagaaaattaatattcctactggcaaaaattacgctaaagcgaaagaagtcggtgaatatccaacactaggttctaactggactgcggaaatttcttcatcttcctctggtttagctgcagtaataactcttggaaaaattattactgattctggtattttattagctgaaattgaaaatgctgaagctgctatgacagcggttgactttcaagcaaatcttaaaaaatatggaattccaggagtagtagcgctttatccaggcgaattaggcgataaaattgaaattgaaatcgtatctaaagctgactatgcaaaaggagcttctgcattactcccaatttatccaggtggtggtactcgtgcatctactgctaaagcagtgtttggatatggaccgcaaactgattcacagtacgctattatagttcgtcgtaatgatgctattgttcaaagcgttgttctttcaactaagcgtggtgaaaaagatatttacgatagtaacatctatatcgatgactttttcgcaaaaggtggttcagaatatatttttgcaactgcacaaaactggccagaaggcttctctggaattttaactctgtctggtggattatcatcaaatgctgaagtaacagcaggagatttgatggaagcttgggacttctttgctgaccgtgaatctgttgacgttcaactgtttattgcaggttcttgtgccggtgaatctttagaaacagcatctactgtccaaaaacacgtcgtttcaattggggatgctcgccaagattgcttagtattgtgctctcctccgcgtgaaactgtagttggaattcctgtaacccgtgctgttgataacctagtcaattggagaactgcggcaggttcatacactgataataactttaatatcagttcaacctatgcagcaattgatggtaaccataagtatcagtatgacaaatataatgatgtgaatcgttgggttccattagcagctgatattgctggtttatgcgcaagaactgataacgtatctcagacttggatgtctccagctggttataatcgtggtcagattcttaacgttattaaacttgctattgaaactcgccaggctcagcgcgaccgtttataccaagaagctatcaacccggtaaccggtacaggtggtgatggttacgtattgtatggtgataaaacagctacttctgttccttctccatttgatcgtattaacgttcgtcgtctgtttaatatgttgaaaacgaatatcggacgtagttcaaaatatcgtttgttcgaattaaacaacgcgtttactcgttcatcattccgcacagaaactgcccagtacttacaagggaataaagctctcggtggaatttatgaatatcgtgtagtttgcgatacaacaaataacactccgtcagtaattgatagaaatgagtttgttgcaacattctacatccaaccggctagaagcattaactacattaccttaaacttcgtagcaactgctactggtgcagatttcgatgagttaactggtcttgctggttaatacggtgcattctaaaggcctgtttcggcaggccatataaatacactatatccttaattctttaattctatatgccctaggttaaacatagggatataaatactacagaggctaatatgtttgtagatgatgtaacacgagcgtttgaatctggtgattttgctcgacctaacttattccaagtagaaatttcttatcttggacaaaattttacgttccaatgtaaagctactgctctaccagctggtattgtagaaaaaattccagtcggatttatgaaccgtaaaattaacgtagcaggcgatcgtacattcgatgactggactgttacagtaatgaacgatgaagctcatgatgctcgtcagaagttcgttgattggcaaagcattgctgcggggcaaggaaacgaaattactggtggaaaacctgcagagtataaaaagagcgctatcgttcgtcaatatgctcgtgacgctaaaacagtaacaaaagaaattgaaattaaaggtctgtggcctactaacgtgggtgaacttcaattagattgggattcaaacaatgaaatccaaacttttgaagtaactcttgctctcgattattgggaataaaatgaatggggagaaatccccatcctgcttaaagcagagaagtccattataaatataactataattcccatttggagaatacaatgaaatttaatgtattaagtttgtttgctccatgggctaaaatggacgaacgaaattttaaagaccaagaaaaagaagatcttgtttccattacagccccaaagcttgatgatggagcaagagaatttgaagtaagctcgaatgaagctgcttctccttataatgctgcattccaaacaatttttggttcatatgaaccaggaatgaaaactactcgtgagcttattgatacatatcgtaatctcatgaataactatgaagtagataatgcagtttcagaaatcgtttcagatgctatcgtctatgaagatgatactgaagtcgtagcgttaaatttggataaatctaaatttagcccaaaaattaaaaatatgatgttagatgaatttagtgatgtattaaatcatctatcgtttcaacgaaaaggttctgatcattttagacgttggtatgttgattcaagaattttctttcataaaatcattgatccaaaacgtccaaaagaaggcataaaagaattacgtagattagaccctcgccaagttcagtatgttcgtgaaattataacagaaactgaagctggcacaaaaatagttaaaggttacaaagaatattttatatatgatactgcccatgagtcatatgcatgtgatggtagaatgtatgaagctggcacaaaaataaaaattcctaaagctgccgtcgtttatgcccattctggattagtcgattgttgcggtaaaaatatcatcgggtatttgcatcgtgctgttaaacctgctaaccaattaaaattattagaagatgctgtagtcatttatcgcattactcgtgctcctgaccgtcgtgtttggtatgtagacacaggtaatatgcctgctcgtaaagctgctgagcacatgcaacatgttatgaacacgatgaaaaaccgtgtagtatatgatgcatcaacaggtaaaataaaaaatcaacagcataatatgtctatgaccgaagactattggttgcagcgccgtgatggtaaagctgtgacagaagttgatactcttcctggtgctgataatactggcaatatggaagatattcgttggtttagacaagctctttatatggcattacgtgttcctctttcacgcattccgcaagaccaacaaggcggtgtgatgtttgattctggaactagcattacacgtgatgaattaacgtttgctaaatttattcgtgagttacagcacaagtttgaagaagttttcctagatccgcttaaaacaaatcttttgcttaaaggtataatcacagaagatgagtggaatgatgaaataaataatattaagatagaatttcatcgggatagctactttgctgagctcaaagaagcagaaattttggaacgaagaattaatatgctaaccatggcagaaccatttattggtaaatatatttctcacagaactgctatgaaagacattttgcagatgactgatgaagaaatagaacaagaagccaagcaaattgaagaagagtctaaagaggctcgtttccaagaccccgaccaagaacaagaggatttttaatggaaggtttaattgaagctattaaatcaaacgacctcgtagccgctcgtaaattatttgctgaagccatggctgcaagaacgattgatttaattaaagaagaaaaaatcgctatcgctcgcaatttcttaatcgaaggtgaagaacctgaagacgaggatgaagatgaagatgacgaagatagtgatgataaagacgacaaaaaagacgaagactctgacgaagacgaggatgatgaataatgcttctgatccctgaaactcatgaattagttctcgagaatgtcgaagcacttattcctgaagcacagggtcgctttgacgaattgtcttctgctttaaataaagacgatataaatacaattgtcgagaatatgcttgatgatgaaactgatttagcggttgcattagcttctattaatgaaaatatgccgttaaatgaattcatcgttaaacatgtttctgcccgtggtgaaattactcgcactaaagaccgcaaaacgcgtgaacgaaatgcatttcaaaccactgggctgtctaaagcaaaacgtagacaaattgctcgtaaagctaccaaaacgaagattgccaatccagcaggtcaatctcgtgctcagcgtaagcgtaaaaaagctcttaaacgccgtaaagcattaggattaagctaatgaatgaaccccaattactaattgaaacttggggtcaacctggcgaaattattgatggcgtaccaatgcttgaatctcatgatggaaaagacttaggtttaaaaccgggtttatacatcgaaggaatattcatgcaagcggaagtcgtcaatagaaataaacgtctttatccaaaacgtatattagaaaaagcggtaaaagactatattaatgagcaagttttaactaaacaagctctcggagaattaaatcatcctccacgcgctaatgttgacccgatgcaagccgctatcattatagaagatatgtggtggaaaggaaatgacgtatacggacgagctcgtgttattgaaggtgaccatggtcctggagataaattagcagctaatattcgtgccggatggattccaggagtttcttctcgtggattaggttcattgactgacacaaatgaaggttatcgtatcgtaaacgaaggattcaaattaactgtaggtgttgatgcagtatggggtccaagtgctccagatgcatgggtaactcctaaggaaattaccgaatcacagacggcggaagccgatacaagtgccgatgacgcctatatggctctcgcagaggccatgaaaaaagcgttataaatattattatctaaacaacaggactacaaaatgcttaaagaacaactgattgccgaagcgcagaaaattgatgcttccgttgctcttgatagtattttcgaatcagttaatatttctccggaagcaaaagaaactttcggcactgtattcgaagctaccgtcaagcagcacgccgttaaattagctgaatctcatatcgctaaaattgctgaaaaagcagaagaagaagtagaaaaaaataaagaagaagccgaagaaaaagctgagaagaaaatcgctgagcaagcttctaaattcattgaccatcttgcaaaagaatggctcgctgaaaataaattagcagttgataaaggcatcaaagccgaactgtttgaatccatgcttggtggattaaaagagctctttgttgaacacaacgttgttgttccagaagaatcagttgatgttgtagctgaaatggaagaagagctgcaagaacataaagaagaatcgcctcgtctgttcgaagaactgaatatgcgcgacgcatatatcaattatgtgcagcgtgaagtggcattgagcgaaagtactaaagatctgactgagtctcaaaaagaaaaagtctctgctctggtcgaaggtatggattattcagatgcattctcaagtaaattgagtgcaatcgtagaaatggtgaagaaatctaataaagatgaaagcactattactgagagtataaatactcctgatactgaagcagccggactgaatttcgtcactgaagctgtagaagataaagctgcacagggtgcagaagatattgtaagtgtatatgcgaaagtcgcatctcgtttctaattttaaaggttaacacaaatgactatcaaaactaaagctgaacttttgaacaaatggaagccattactggaaggtgaaggtttaccggaaattgctaatagcaaacaagcgattatcgctaaaatctttgaaaaccaggaaaaagatttccagacagctccggaatataaagacgaaaaaattgctcaggcattcggttctttcttaacagaagctgaaatcggtggtgaccacggttacaatgctaccaacatcgctgcaggtcagacttctggcgcagtaactcagattggcccagctgttatgggtatggtacgtcgtgctattcctaacctgattgctttcgatatttgtggtgttcagccgatgaacagcccgactggccaggtattcgcactgcgcgcagtatatggtaaagacccagtggctgccggtgctaaagaagcattccacccaatgtatggtccagatgcaatgttctctggtcagggtgctgctaagaaattcccagctctggctgctagcacacaaaccacagtaggtgatatctatactcacttcttccaggaaactggtactgtatatctgcaagcttctgttcaagtaacaatcgatgctggtgcgactgatgctgctaaattagatgctgaaattaagaaacaaatggaagctggtgcactggtagaaatcgctgaaggtatggctacttctatcgctgaactccaggaaggtttcaatggttctaccgataacccatggaatgaaatgggcttccgtatcgataagcaagttatcgaagctaaatctcgtcagctgaaagctgcttactctattgaattagcacaagacctccgcgctgttcacggtatggatgctgatgctgaactgtctggtattctggctacagaaattatgctggaaatcaaccgtgaagttgttgattggattaactactcagctcaggttggtaaatctggtatgaccctgactccgggttctaaagctggtgtatttgacttccaggacccaattgatattcgtggtgctcgctgggcgggtgaatcctttaaagctctgttgttccagattgacaaagaagcagttgaaattgctcgtcagaccggtcgtggtgaaggtaacttcattatcgcttcccgtaacgtagttaacgttttggcttcagttgataccggcatttcttatgctgcacagggtctggctaccggctttagcactgatactaccaagtcagtatttgctggtgttctgggtggtaaataccgcgtatatatcgaccagtatgctaaacaggattatttcactgtaggttataaaggtccgaacgaaatggatgctggtatttactatgctccatatgtagctctgactccgctgcgtggttccgatccgaagaacttccaaccggtaatgggattcaaaactcgttacggtatcggtatcaacccatttgcagaatccgctgctcaggctccggcttctcgcatccagagcggtatgccttctattctgaatagccttggtaaaaacgcttactttagacgtgtatatgttaaaggtatctaatctctaacgatagaaacacaattttagggaaccttcgggttcccttttttctattttatacgatagcaatcaggcatatcatccgcatttatccaattgcgaatagttttaggactaactttaaaatgctccgctgcgtaatcaggattatcaaatttaacgccctttatacatattggaataaattttttaataccaccaagtttttcagaaatagctttacgatgtgaaatcgatataggtttgttttttcgtggatgaacatgtgttttataatattcattgcgccctttaactcgcttcgcaatagtttcatcagattgcttaacgcctgtttttgcctttgatatttttcgtttagcttccacagtcattccttcttttgttcgtattgataacatattacgatatgaaggatcttgcaaatgaactataactggatttcctctgccaccaatagcagcattataggtatcagttctcataacgaattcctcattaactagtaaagcttccattttatacatctcctcagatgaggagaaagaataaagaatttcttttttaaagttatgaataccatattttttgatggattttttgatgtttacgccagaacccatataaccatcgttttcgtcaagagtagcatgagctccgatgtaaatttttccattgatgatattagtaatttgatatattaaatatttcattttaaacatcactccgtttgtatatgattataatatcatattactttggtcttgtaaataactttataaatagtattatatttcaacaaggaaaatacaatggctaaaatcaacgaacttctgcgcgaatcaaccacaacgaatagcaactcaatcggtcgcccaaatctcgttgctttgactcgcgctaccactaaattaatatattctgacattgtagcaacgcaaagaactaatcaacctgttgctgctttttatggtatcaaataccttaacccagacaacgaatttacatttaaaactggtgctacttacgctggcgaagctggatatgtagaccgagaacaaatcacagaattaacagaagagtctaaattaactctcaataaaggcgatttattcaaatataataatatcgtttataaagtattagaagatactccatttgctactatcgaagaaagtgatttagaattagctcttcagattgcaatcgttcttttaaaggttcgtctattttctgacgcagcgtcaacaagcaaatttgaaagctctgatagtgaaattgcggatgctagattccagattaataaatggcaaactgcagttaaatctcgtaaacttaaaactggcatcacagttgaattagcgcaagatttagaagcaaatggattcgatgctcctaatttcttggaagatttgcttgcaactgaaatggcagatgaaatcaataaagacattctgcagtctttgattacagtgtcaaaacgctataaagttacaggaattactgatagtggattcatcgatttgagttatgcatctgctcctgaagctggtcgttcattataccgaatggtatgtgaaatggtttcgcatatccaaaaagaatcaacttatacagcaacgttctgtgttgcttcagctcgtgccgctgcgattcttgctgcatcaggctggttaaaacataaaccagaagatgacaaatatctttcacaaaatgcctacgggttcttagctaatggtttaccgctttattgcgatactaacagcccattagattatgtaatcgttggcgtagtagaaaatatcggtgaaaaagaaattgttggatcaattttctatgctccgtatacagaaggtctcgacttagatgaccctgaacatgtaggtgcatttaaagttgttgttgatccagaaagcttacaaccatctatcggtttattagttagatatgctttatcagcaaatccttatactgtagcaaaagatgaaaaagaagcaagaataattgacggtggagacatggataaaatggcaggtcgttcagatttgtctgttttattaggtgttaagctaccaaaaattatcattgatgaataaaacaaagggacctttcggtccctttttatttaacttaccaactcaatccaagctggacgaagtacatcttgtaccattttaactaattcctttttaatcaaagaaggattatctgcttgagttagagtaataccttcacgagaagtttcttccaaaatatcttgaacagttagccccatcacctttccaaaatcctttggaccaatttcgccaattttagaaataacgttatttacgcggttcagtgtaacgtaacaagctaaaattcccaccaatttgttatcagcttctgatagctcaactttagctttaataggcttatcagactttttcttttcactaaatttagagttcttgcatttaatcgctacacgatttccattacgaagccaagaaggataacaaggtttcaatacatatccttcagcagtaaatacttcgccttttgcttcggcattccaaacgcatttatttgcatcaactaatccagcatggtctactgtaaaattataatcttggacgacagaatctaaatcatttggcaatttaataagctcttcaaatttaccgcgacctaaaagtggagccattttaaatttaaatgtattacagaatgattccatcatataatcatctacataagtcacatcaccgctttctgtagtaacaataatgtcaaatacataaaaatctttatcacaataatcaacattcttctgaatgccaggtccagcgaattcgccaaagacttgataagatacaaccgctgaggtttccataatatcttgtacagctttaatggaatcagcataattcttcaaaataatttcatacccaaagaaatcttcagcaggaagaatcggtccagtgcgtttagcgcaagtcactttatcacgctcaataatcaatgagaaatttgtgccgtgaatcttttcacgagctacccactccccaccagtcaatcccaagctataaagtttttcaataaatttagagttgtaatgattttcaagactgctatactttttaaacataattaatcctcaaaatgtaatttctaaccaatcaccatcacgctgatcactattgactttaaagctgaatccttcttttctcagccaatcaccaatttcttctgtaatcaatttatcacgagcaatacaataataattaaaatgtgttttaccttgttcagctgctttattagcaagttctgaaaaatctttaataaaacactctagcttaaactgtttactttttaatgctttttcgcgtaattgattagcaaaagattcattttcataaagatcatactgttccatttttcacctttttattgatatgtctttttctatagacaactttttctcgagcccataatacagccacttcttttgcctgtaagtttaattcacgagcaatttcaatgaatgactttccagactcatgaagagtaaacaccacaacctcagttctcataatcaatctcatgttatcgagttggtgccattatatacatcattttctgattgtgttttgtgtgctttcaaaatgaagaaaggggccgaagccccttatgattatggataggtatagatgataccagtttctaaagcagttttatgaatgatgtatccattacgcgattcttggacatcaacttctggatagtctttcatcatcttctggagagtgtaacgatgcaggtaatatttactatctgggtcgtcagttttccaatctttaccttcttcggtcattttttggatttcatccataacccaccaaccgcaccagatgtaagctgagctacggtgtggaagaggatgaacataaggtaattcaccttctggttctggagcaactttagccgtgactgttacattaccagttttggtaacggttacagggttataatctgcagcagtaacagttgcagtaacttcaatagtttgacttccaacagatgaggtatcgacagtatatacgttagttgacccttctacaggagaagaatctttcttccatgagtaagtaatttgtgcttcttctggagcacccgtaacattagccgtaaatgtagccgaagcatcttgctgaacattaatagaaggaggagtcaatgtaacctgtggattcattgtcttcttattaaccgttaatgatacttcattagaagtaacgcttagtgcatcataatctgtcgcggttacttgggctacgcatttaattctttttactccacttgtagttggagtatagctaaatgtagagttagtttctccaccaacttgtgaatcatctacataccactgatacgtagcagatgctccatcaggttgagaagctaaggcagcagtaaattgaactggggttccaatcactccagccgcaggactagcaggagttacggctaaggtagtcgtctgtgtcttatttttaactgtgatagttgttgtcgcttcagccgtttccgggcctccttcagaaagtgtatttgttgcaactactttaatagtcttttgaccggcaggtccttttagtacataactaaaagttgcttcagctccatcttgtggaacattatctacgctccaagcatatgtaatagttccgcctccagtttgaccactgggtgtagcagtaaactgcttagtttcatcaataacccctgtaggtgttttaggagttatatcaactgtaaaagtcataagttatccttattttaatgttacgaaagaagagttgcgtgtttcacgaattaaaactgatccatcgcgattaatgtaataaattaagctaaataaagtttggtgtgctgacgcatgttcaaaactagttgggtgagatttccaatcaggagtttcagcaatccattgataaatccaccaaggaacagtacagaatcctagattttttccaatcagttgaagattcggactaaagttttccggaagagtaaatacagacggcttttcagattcaataatctcagctacagcctgttcgaatttttcttcaacaaaaggagtatcttcaatcaaaacatcggtattttcaggaattttatccgtttctactacttcaattttaatgtcagatttaatcggagaatcaatcagaagtgctgcttctggattgacttcttcatcgtcatattttaatccctctgcggcatcagcagcatcaattaagtctttaatagataacccatcagtctctggcataggttcactagcgagcttctggagggcttcttcaatatcaacaacgatattatcaaaagatttattctttttgacctttataccaaactgttcagcatattcagctaatttagctttagcttctttgttatcatcaagagccttcagctctgcaatataatctttatctatcataatatttcctcagtataaatatagatatatttattactcggaaaatagtatgtaccactttgtatatgaaacaacaaatctaataaatggtaaaaagtatataggaaagcactctactgatgacttgaatgatggttaccttggttccggtaaggcaattcagcaggctataaagaaatatggtgaaaacaatttctctagaacaatactaaaagagtttaaaacttccgaagaagcgtacatgtatgaagaagaaattataactcctgaactaataaaaagcaaaaattattataatatgaaacctggtggaattggtggaattgttatgactacagatgttatagcaaagatgaaagaatcttccgctaaaagatttgaaaactcaccgggcacggtattaggtaaaacttgttatactaatggaactaaaaatatttttattaaacctggagaacttgttccagaaggatttgtaaaagggatggttcatcctaatagaaagtccagaaaaggatgtaaagtcaaaccgactaccacaggaactttttgggtcaataatggcgcaataaataaattaatacaaccagacggtattattcccgacggatttattaaaggtcgtctcatgaaaagagattctaaaggcaaatttagtaaggcataattatggatattaaagtacattttcacgacttcagtcatgtacgcatcgattgtgaagagagcacgttccacgaattaagagatttcttttcgtttgaggccgatggatatagatttaatcctcgcttcagatatggcaactgggatggacgaatccgtcttttagattataatcgtcttcttccattcggcttagtcgggcaaattaaaaaattctgtgataattttggctataaagcctggattgacccacaaattaacgaaaaagaagaattatcaagaaaagattttgatgaatggctttctaaattagaaatctattcaggaaataaaagaattgaaccgcactggtatcaaaaagatgcagtgttcgaaggattagttaatcgtcgtagaattcttaatcttccaacatctgcaggtaaatctttaattcaagctttgcttgcgcgatattatttggaaaattatgaaggtaaaattcttatcattgttccaacaactgctctgacaactcagatggctgatgacttcgtcgactatcgtttattcagccatgcaatgataaagaaaattggtggcggagcatcaaaagatgataaatataaaaatgatgcaccagtcgttgttggtacatggcaaactgtagtaaaacaaccgaaagaatggttctcacagtttggaatgatgatgaatgatgaatgccatcttgctacaggaaaaagtatttcatctatcatatcaggtttaaataactgcatgttcaaattcggtttgtctggttcattacgtgatggcaaagccaatatcatgcagtatgttggaatgtttggtgaaatatttaaaccagtaacgacttctaaattaatggaagatggacaagtaactgagctaaaaattaatagtatttttcttcgctatcccgatgagttcactactaaattaaagggaaaaacttaccaagaagaaataaaaattattactgggcttagtaaaagaaataaatggatcgctaaattagctattaagcttgcgcaaaaagatgaaaacgcttttgtcatgtttaaacatgtatcgcatggtaaagctattttcgatttaattaaaaatgaatacgataaagtttattacgtatcaggggaagttgataccgaaacccgcaatataatgaaaaccttagctgaaaatggtaaaggaataattatagtagctagttatggtgtattttctactggtatttcagttaaaaatctgcatcacgttgttttagcgcacggtgttaaatcaaaaatcattgtattacaaacaatcggtcgtgtattacgtaagcatggttctaagacaatagcaacagtctgggacctcatagatagcgcaggcgtcaagccaaaatctgctaatacgaaaaagaaatatgttcatttgaactatcttttaaaacacggcattgatcgtattcagcgctacgcagatgaaaaatttaattacgtaatgaaaacagttaatttaataagcttcggccctttggagaaaaagatgttactagaatttaaacaatttctttatgaagcttctattgatgaatttatgggtaaaattgcctcttgtcaaacattagaaggtttagaagaacttgaagcttattataagaaaagagtcaaagaaactgaattaaaagatactgatgacatctctgtgagagatgctttggcaggaaaaagagctgaattagaagattcagacgatgaagtagaagaaagcttttaaattaaaaaaggcccaaccaaaaaggaagggccaaaactatagactaaaggtcacactatagcaaaagttgtgtttcatttaattgttcttccgaactttctgaaactggtagttctttaatgtaattatagcaaggcccaggatgtacaggacctttgtctgtttcaacaaccaatgcagaatcgattggagttttacagacaacacaaatcttatctgacatgattgtctcctctgaattatatctatttatacaactctcatatgcatatcaatgcccatatctttagaataaaaatattcatcaagatatccggcaaattttcctttaatataaaggacatcttcaccacacgggtggtcggccaggatacgaatatcctgacgcttaagattatgctttttcattaagaattgaatttccgtttcaaattcttcttcataattaaaagcatcatcaatgctatatctcattattttccagcctcaaatgctcgcatgtcttgaatatgcttaatagcaaatccacgtgatttaatagcatcaagagctccgctacagaaatctaataaaatcccccaatactgcaacgaggtatcaacctttaaaacatccttatccgctgatagaactgtcttcatttctgatttctcgtaacgatccatactaaattcatcaccatctcctcgtcccgagtagtagtctaatctagctttaagagcaacttttttctgtgcttcaattctaagcatttcctttttaatacttgaatgcttattaagccatttactatataacatcacattattagctgcttcatactgtaatttagtcgaatctataaacacatctttcttcaattcttcttgaagatcttctaatctcatattgttctctattcaattgttattggttgttattggatggacttagattcattataccacgttttaacgtgaagcattatactctattactggaagccagctgcagttttatctgctcaatatcatcaggattatcgatgaccgaaaagcgtatttctactatcagagtataatcgtcataaacgggtatcacattaactgctaatttatcaatacgtggctcatagtttcttactgcgctttcgatattgcgttcaaccgtgtcagcagtaagaggagtcatattttcaaaaagctggtctgataaatcacatccaaattcagggtcaaacggtcttgaaccttttcttgttgtaataattcccaaaagactgtttttaattgaccttaatccaagcgatctggaaacgtctttgttccaatccattttcatttccgggtcaatatcagaataaagcttattaatatttgccattatagtaactcaaagaactctttgaggcctcttattacgtgagcatgggtttttccacactctggacacttaattggaacagccaaataaacggtaggctttaaaagcatatcttttatagctacaatatctgactctgtgatgatagaatataaatcttctagttccttttcatttaagtcttcaactggaatgctttccccgttagcatgaatcgtttctatacatgatactatcatgtgggctatatttttatcatcaaaaattttagggtatcggaatttaattttaatgtcacctagtgtataccagaggtcttctggtgcatctatttgtgtatgtaatagatttatatgggttggtatttcagttccacaggtgcacttccaggagttttcgtgattaacttcaccgagagaatgtgcccataaatgaatcaacaatagttctgattcttggcggtttaaatcttttgcatttgtgcagtctttgattagctttttaacaattacttctacggaaccattatttttggcagtaataagttctagatattctttaagcgtgaatgcgcgacaattgattattttagaaccaactctcacatcaaatttgtattcatacatatttagctcctttatttatcatatttataaatagaataaaaggagcatctatggcaaacattattcgttgtaaattaccagatggtgttcatcgttttaaaccatttacggtagaagattatcgagattttttgttagttcgaaacgatatagaacatcggtcaccacaagaacaaaagcaaataattactgatttaattgatgattattttggagactatccgaagacttggcaaccatttatatttttgcaggtatttgtagggtcaataggtaaaactaaaagtacggtcacatttatatgtccaaaatgtaaaaaagaaaagacagttccatttgaaatatatcaaaaagaattaaaggaccttgtttttgatgtagctaatgttaaaattaaattaaagtttccttctgagttttatgaaaataaagcaaagatgattactgaaaatattcattctgttcaagtagatgaaatatggtatgattggaaggaaattagcgagtccagtcaaatagaactagttgacgccatcgagatagaaacattagaaaaaattctcgatgcaatgaatcctattaatttaactctacacatgtcatgctgtaataagtacattaaaaaatacactgatatagtagacgtgtttaagctattagttaacccagatgagatatttactttttatcaaattaatcacacactcgtaaaaagtaattatagcttaaattcaataagtaaaatgattcctgccgagcgcggattcgtattaaaactgattgagaaggataaacaataatgagtatgttgcaacgccccggatatccaaatctcagcgttaaattatttgatagctacgacgcttggagtaataatagatttgttgaattagctgctactattaccacattaactatgcgggattctctttatggccgaaatgaaggaatgctgcagttttatgattctaaaaacatccatacaaaaatggatggaaatgaaataattcagatttctgtagctaatgcaaatgatattaataatgttaaaacacgaatttatggatgtaagcatttttccgtgtcagtagattcaaaaggtgataacatcattgctattgaattgggaactattcattctatagaaaatcttaaatttggtagaccatttttccctgatgcaggtgaatctataaaagaaatgcttggtgtcatttatcaggatcgcacattattaactccagcaataaatgctataaatgcttatgttcctgatattccatggactagcacatttgaaaactatttgtcatatgtaagagaagttgctctagctgtaggaagcgacaaatttgtatttgtatggcaagacatcatgggcgttaacatgatggactatgatatgatgataaatcaagaaccatatccaatgattgtcggtgagccatctttaataggtcaattcatccaagaattaaaatatccattagcatatgatttcgtttggttgactaaatcgaatcctcacaaacgtgacccaatgaaaaacgctactatctatgcgcattcatttttagattcttcaataccaatgattactacaggaaagggtgaaaactctattgtggtgtcaaggtcaggtgcttattctgaaatgacttataggaatggatatgaagaagctattcgtcttcaaactatggcacaatatgacggctatgctaaatgttctactatcggtaattttaacttgactcctggtgttaaaattatttttaatgatagtaaaaaccaatttaaaacagaattttacgttgatgaagttatccatgaattatccaataataattcagtaactcatctatatatgttcactaatgcaacgaaactggaaacaatagacccagttaaggttaaaaatgaatttaaatctgatactaccactgaagaaagtagttcttccaataagcaataaagaagtttctattcctaaaatgggtcttaaacattataacattttaaaagatgttaaaggtcctgatgaaaatttaaaacttctcattgattctatttgtccgaatttatcaccggcagaagttgatttcgtttctattcatttattggaatttaatggaaagattaaatctcgtaaagaaatagatggttatacttatgacattaatgatgtttatgtatgccaaagattggaatttcaataccaaggaaatacattttattttagacctcctggaaaatttgaacaatttttaacggtgagcgatatgttatctaaatgcttacttagggtcaacgatgaagttaaagaaattaattttcttgagatgccagcattcgttttaaaatgggcaaatgatatttttacaactttagcaattcctggccctaatggtccaataactggaattggcaatattattggattatttgaatgaaaaagccacaagaaatgcaaacgatgcgtagaaaagttatttcagataataaaccaacacaggaagcggctaaatccgcttctaatactttatctgggcttaatgacatatctacgaaattggatgatgctcaagctgcttctgaattaatagctcaaactgtcgaagaaaaatcgaatgaaataattggagcaattgacaatgtagaaagcgcagtgagtgatacatctgccggttctgagttaattgctgaaactgtcgaaattggcaacaatattaataaagaaatcggtgaatcgctcggaagcaaattagataaattaacaagtttactagagcaaaaaatccagacagctggaattcaacagactggaactagtttagctacggttgaaagcgctattcctgttaaagtcgttgaggatgatactgctgaatctgtgggtcctttattaccagctcctgaagcagttaataatgatcctgacgctgattttttccctacccctcagccagttgagccaaagcaagaatcaccagaagaaaaacagaaaaaagaagcatttaacttaaaattatctcaagctttagataaattaacgaagactgttgattttggatttaaaaaatccatttcaattactgataaaatatcaagcatgctatttaagtacaccgtcagtgctgctattgaagctgctaaaatgactgcaatgatattggctgttgttgttggaatagaccttttgatgattcactttaaatactggtcagataaattttcaaaagcctgggatttgtttagtacagactttaccaaattctctagcgaaaccggaacttggggtcctttattacagagcatctttgattctattgataaaattaaacaactttgggaagcgggagattggggtggattgacagtagctattgttgaagggcttggaaaggttctttttaatttaggtgaacttattcaattaggtatggctaaattatctgcagcaattcttcgagtcattcctggtatgaaggatactgctgatgaagtagaaggaagagcattagaaaatttccaaaattctactggagcatctctcaataaagaagaccaagaaaaagtagcaaattatcaagataaacgaatgaatggagaccttggcccaatagcagaaggactagacaaaatctctaactggaaaactcgtgcatctaactggattcgtggtgtagataataaagaagcgctgactaccgacgaagagcgtgcggcagaagaagaaaaattaaagcaactttcaccggaagaaagaaaaaatgctttaatgaaggctaatgaagctcgtgctgcgatgattcgttttgaaaaatatgccgattcagctgatatgagtaaagactcaacggttaaatcagttgaagctgcctatgaagaccttaaaaaacggatggatgacccggatttaaataattcaccggcagttaaaaaagaacttgctgctagattttctaaaattgatgctacttatcaagagctcaagaaaaatcagcctaatgccaaacctgaaacttctgctaaatcaccagaagcgaaacaagtccaggtgattgaaaagaacaaagcacagcaagctcctgttcaacaagcatctccttcgatcaataatactaataatgttattaagaaaaatactgtcgttcataatatgacacctgtaacgagcacgactgctcctggtgtatttgatgcgactggagttaattaaggaataatatggcaattgttaaagaaataactgctgatttaattaaaaagtccggtgagaaaatttcagccggacagagtactaaatcagaagtaggaactaaaacatacacagcccagtttccaactgggcgtgctagtggtaatgacactacagaggacttccaggtaacagatctatataagaatggattattatttactgcatacaatatgtcatctagggattctggaagtcttagatcgatgagatctaactactcttcttcatcttcgagtattttacgtacagctagaaacactattagtagtacagtatcaaaactatcaaatggattaatatcaaataataattcaggaacaataagtaaatctcctatcgcaaacattcttttaccgagatctaaatctgatgttgatacatcatcacatagatttaatgatgttcaagaaagccttatcagtagaggcggaggtactgctactggtgtgctaagtaatattgcttcaaccgcagtatttggggcactggaaagtataacacaaggtataatggctgataataatgaacagatttatacgacagccagaagtatgtatggtggtgctgaaaatagaactaaagtgtttacatgggatttgactccacgttcaacagaagatttaatggctattattaatatctatcaatattttaactatttttcttatggtgaaacgggtaaatctcaatatgctgctgaaataaaggggtatttagatgattggtatcgttctacgttaattgaacctttatctccggaagacgcagctaaaaataaaacactatttgagaaaatgacatcgagtttaactaacgttctagtagtttcaaacccgacagtttggatggtgaaaaactttggcgcaacatctaagtttgatggaaaaacggaaatatttggtccatgtcaaatacagagcattagatttgataaaacacctaatggtaactttaacggattagctattgctccaaacctccctagtacatttactctcgagattactatgagagaaattatcacgttaaaccgtgcttctttatatgcggggactttttaatgtattctttagaggaatttaataatcaagcaataaacgcagatttccaacgtaataatatgtttagctgcgtttttgcgacaactccatcaactaaaagctcttcgttgataagttcaattagcaacttttcttataataacttgggcctaaattcagattggttaggattaactcaaggtgatattaatcagggaattaccacgctaattacagctggcacacaaaaactgataagaaaatcaggagtcagtaaatatcttattggtgccatgagtcaacgtacagttcaaagtttattaggctcatttacagttggtacatatttaattgacttctttaacatggcatataactcatctggattgatgatatactctgtaaaaatgccagagaatagattatcctatgaaactgactggaactataattctcctaatattcgtataaccggaagagaattagaccctttggttatttcatttagaatggattcagaagcttgtaactatcgtgcaatgcaagactgggttaactccgttcaagacccagtaactggactgcgtgctttgccacaagatgtcgaggcagatattcaggttaatcttcattctcgcaatggattacctcatactgcggtgatgttcacgatgcattcaatatcagtgagcgctcctgagttatcatatgatggagataaccaaataactacatttgatgttacttttgcgtacagagtgatgcaggctggagcagttgataggcaacgtgcgcttgaatggcttgaatctgctgctataaatggtattcaaagcgttctcggaaatagtggaggtgttactggactatctaattcgctttcacgacttagtagattagggggaactgcaggaagcatttcaaacattaatactatgacaggaattgtcaattcgcagagtaaaatattaggagcaatataacaatggggaccgaaaggtccatatttttatttacggaatgaaatgaaagcagcaactgaagcaactaaactgtcttcaatataaacttcaatttttacaggagcttctgactcaaatttacctgttactacaccctgaaaaatactttcagtctgttctggctttgaaaaattttcagaaggaaaaattccgaactttttatctgttccaaaaattttgataaattcatcgtaaaccgcttcgttaaaagcattatcagcaggaataacgccttcaactacaagttcttgacctaaaaagcgtaaagaagatttcattttgtgttcctcatgttatgttagtaagactactataacacaacacgagggacttgtaaactacattttgaactttttagtacgcgtaataggcatgcgtcgattttatactgtttcattgtttgaagagcagtatcaaaaacagcattaatgacaccaattggatttccacccaagtttttaagcttaactaatgatagtttctcattaacacctatcattacgatatgcatcattttatcgcctggtttaacgttttatttgtatcaccgccagaggtgtatgtacaaaatctaaatccaggaagtacactttcttcaccggcttgaatagcaaaaatttgtggtattttatgcttaggatttaatgtaacaaccggcgccgaagcgccgtcaaataattctgtaataagttccatgatttatccttgaacgaacttgtaaggcatgtttgcaatatctatgcaagacgcaataattccaagagatgattctactttctgtttaacatttgatgaaacaaatgatgcaaagtcaactctatcttctatatcacctgtcattgtaaccaattcaccagtttccattaaatggtctccgtcatagattaccgattcggtgagttcttctgtggtcataacttcagcttgaataagcttgttgttagttttaactgttccatcattgtaagatgcatcggttattttattaactttgaccattaatccacgtggcaaaatgacttccatttcatttgaaggcgctaaacttccaccgggtaaaacaacattgaccttatcagccccagtaataacccatccaattccaactaaattatcgctagaatttacaagtccttcatcagttttatcaatagaaacgcttaaacgcttttcgtctggtaaaacacctatagatgaatcagtcatccaagtaccaaaaatatttggatataatgatgttgacacaaagtttctaaaataaaaaactcgattttttaccattgcttcgtatattgaaggtaacattcgttgtgaacgatacaaagtaataccttttggtaatcgttcaccatttttaaaggctgaatctaaattatcaatagctttttctatgtcagatgctgtcaaaatacttgtacgctcatctggattatataatcccaaaagagcattatttatgtctacatatcctgaacctacgtattcacgaattccgcgtttttgcgctggtgtgtatttagatgaatctttattttcgactataggatgtaatgaccatccagcggtaagagcatatccacgtaattctcttcgaataatctttgtttttattgcattccaagaattttgtactaactcatttgcagcatcttggtttaaatgcgaatgtttgttaatatttctttcaaaccaagcacccttatatttttctaaagtatcatcgacgatagaagcaatagtttctaaggtttttattgaagtaatagattcttttcgtaatctttctaaagctttattttttatttctgcgttaataatggattctttatcttcaggaattatagaagcttctctgaatgccatcccagctgtaacactgctaagagcattctctagtgcaaatcctgaagtagaaattaccgttaattcattagaatcagaaattaaaggcgcgtccgctggtttatttaattcggccgctgaagcctcaaatttttgaaacattggtgtttcaaatctagaagattccaatgactgactttgcgcaattgctctacgggaaattttaactttaacgattacagcttggtcagaacgtttatcattttcttgcgcaatagatgctgcaattgcctcatttttagttacttgagccccagtatctttattgatataaacatcaccgaccttcgattcaactttagtaaagagctcggtactaatttccggaactcctggaatgtcttctagtgatacatttttgcgatgtataagaatatatgcatactttttatcgtaatcccagagttccttaagaaggacgtatctaccacctgaacgactacggataagtctatcagcaataacttgaatttgtcgagcttggccagcagttttagacttaagaatacggagcatacaggcatcaattttatactggcgcattgtttgcattgcaacagtaaaaactgaattgatataattaattgggcttggaccaagaccttttaatttagcaattgaacctttagcagttaatgtaaaaggaacaatatgcatcattttatcgcccatctttaaatcacgattagtatcacctccagatgtataggtacataaacgaaagcctggttgttcaattgcatcatcaacatgaactgaaaaaatttgcggtattttcttctttggatataagtttgtaattggaagagtagtatcttcgtcaaataattctgtaataagttccatcatatcctctctagtgtttattctattctatttataaaattaaaggcccgaaggcctttaataatctattggtaagagagtacgatatatttcaaactttggacctttttcataagcatcaaatgtttctgtgaatttattataagcatatgcatctataaattcaatcatgatttgtgatacagaagtagaaacatctccaccttctttttgagccacgacaattgtttctaagtaagctttcatagaccagttacctcatgaaaatcaccaaatacatcttcgaatgtattagctttagttttatcttcacgtaaacgaatcgcaatcggaagaaataatttaacgtaatcagtgcggccatcagattttaaccaaccgttgcattcgcactctagaatttttccaatataataattttggttttccataatgcgagtacggtcaagttcatgcgattttacaccggctttatcttttaagcctgaaccagcatttaccttaatttttccacactctgactcaagaataaatccacccgctttagtagggtctttacggtgaggataaattcctacaatttttaaatcaacatcaattacttctttaaatttataaagattttttgaacgagcattttcccataatccatcgatatttttgagaataataccttcaagaccttggtcaatatactttttataaattaccttagcttcatctaggttatttactacctggttttcaattaaaattactttatcatatccagatgtcatttgttctagtttagaaaaacgtacatcatatttcaaacgaaatgcaggaagactgtatatttctaccaacgggacataatcccagacctgaaacttcatgcattgtgcttctttttcagaaatggttccctttaaagatttattggcgattccattagaagcagtacgtgattcagctacttcggcgaattctttagctttactgttttcaggataagcatcaaaaagaaaatctaggccttctggctcctttttaacttgctcatggtataccaattcgccatcaatcaacacaccttctggatgaatctggcgggcttcagcggtcattttaattaactcttccttaagaagatctaatcctagatattcattaccagctcgtgataaaagacgaacatcatctaattcatcacctctaacttcagcaaaacaccgagctccatcagcttttaactgagcaaaggctggaaatttgatattcttattaatgcctttttcatcataagaacttgcgagcatttgaggttgttcaggaattaaacctggccaaactttgtttgcaatagatactgaagcaccacattcaaggtctcgcatcatcactcgacgcaaaacttcaacatcatcttttttaccatcggtgatatatccagttaattcctcaattgctgcatttccagtcaatttccgagtagctaatgtgaattcaatgaagtcaagcatatcggtaagagtcaacattccaaaactctgggtagcaataccaggtttaggccatttcttgatataatactgtaacccacgagaataagtcagacgatatactcgtttaagcaattcattatctttattcttttcaagaattgcttgcttctgtttagttgaaccaatagatgctatttcgttcagaattttaagaatcattgttcatcctttagagtttggtttacagctctattataaatcaattcatcattaagctcagtcaaagacctgtggtacgtggttctaactttatttccttgcatccagtgcttgatataaatgaaaccttgctctacacattttttaaaaattcgttcgtctttttgagctcggaattctggattgcatctaaaaaattgatttacgtgaccgtaatcacgtgtagtattaccttcattttcataaatagtgtgaacaacaaacattagaatgctccttggaaaatattatcaccacaagtaggtctattatacaaatactctataccgccgggcttaatatagttccatgtctgaaacggatgcgtctgatatggatgatatggattataaggattaaatccaggagttctccaggtagtgttccaaggaaaagaatcgtttttaatcatcttttcaattacatcttttatagctttttcactatcaaaactttctttattttcctttggtgaaaaaagcttattctctacatcgttccatgtataaactcgctgagcagtttttggaatattgtcacgctctcctcgagccatccaatacacaggaacacgtaatatttcactcgcgtgatcgcagtggtgagcgagatcgtcaatataacaaattacgttatatttctcttttgcttttttgaacaactcttcttttgaagaatcatgactacacatcagtacttctgagaaagcaccaggaaaaagagcattcaaattaaattgacgatttaatagagcgtcaatagaatcacccaatgctgtaacagcaacaaaattataatcttcttttaatttgttaattacacacagagcatctttatatggagacaagtaacgaataaaatccgaacgattgtatttttcaattaacttgacgccaagttcttcatcacagttaaagagtttaccaggagaaataaatttctcatcttggatcatttttaaaatatgttctaacggaagattatatttctgagcaaaataaggaaggcctgattgccagcttaaacatactccatcaatatcagttaaaatagtaggcttcatagagagtctcttaataggtttaacacatcaataaattcagcttcggttagtattgtatcatcttttgttagaccactagcaatgctgtgcttcaaaacttttcctttcgaggcttgtaatgcatcacgaaagcccttgttttgaatcgctgcttcaaaatatgcatttgtgtataattctttccacgccggggagtatcttgaaaacggaactccaagccaaaagagggtcccacggtcctgagctctagcataagaccttccagcttgttgggcggcaagcccggataacccaaatatacgacgttgttgttcaacatttttcaccttacacccttggaggaatccttcaagacctccaaattgaataccatccataacgaaaggccattgggcgaaattacttaatgcacatgatggccacctaaaattgcttctaatctctaactcagacattttcaatgcttataatttcaacatcagcccaatgaccatagcaaggaagacgaaattcaactggccagttagggtccctttctaatataatagactcaacttgtggttcttcgtgttcatcagtatacggatttttatctgttactttatatgtgaccttaatgtactgaattccaaaaatcttattaattatattcatactaattcctttaatccgtagataggagataattcatcacccatacgaaggtcttcatttccatctacccaggaaacaatataagcctcttttatttgaataccactccatttaaatggaggtagaaccttagaaattaatccaggtataccaactccctttaattcaacagtttgacctaaaaagaatttcattagaacctcatctgaaaaccgtgcgatttaacattaccgccgccaatatcagaaatgttaatttcacgcgcaattgaagggtcaatgtcaatttcacgattgagtttagtgatagctaaagtatcacgcccatttacagtacggaactctaaaggacaaaccacatcaacgtagtttttaatcgattcgctagtaagttgcaaatgtgcaggaaggtctttaggtgcctttgagaaaaccacttcacagaaatttttgcgggtatcaaaataagtagtcataaacataatattttcctcagtaaggggctgaagcccctcattttattttaaatatcaaattcattaagaactacatcaaagattgcttcaagatgctcaggtttagctctgttactcagaatatgacgaatccaagttttaactaagagtttacgattagcaccattccagcaaggatgagtccctaaatcgcgttggcggaaatcatcatccagagcgattttgaagttggaacctttcatcgtgattgaaaccgtgataccgttttcaaatcgcatataaacgtagttaggagtcatatactgttcaatttcgcatactgatccattttgatgtttccagaggcaaatagtatcaatagaacctgcaataccattagaaacatatttacgttcaaagttaatgtagttcatttttattctccgagatgtttaattgcggtacaggtatataatatcatatcctgtaccaaagtaaacaattattttactactttccaatgctgcatgtcaagtttaccaacttttttcatcttctcaattaagcgttctgcacgttggcgagctgtaacataatgccattcgcctaattcattttgttcaatttttccaacgattactgtattcaattcataaatccaaccagtaaagaaattatgaacttgaattgtaaaggtgaaatctgttcccataccttctgttgtttctacttcaataatatcaccttcaactgccattaagaaccacatagtttcatcatatttaccattgaagcatttagttttaactgcagcgttcagattaatcgttttcattttattctcctttgtttgtgtaagataatactatcacaaaggaactatactgtaaacaactttgtgcaatctttggaaaataaaaaaggactcccgaaggagtcctcaacttatgctttctgcttaccaaaacgagaagcatcatctcgaagaaccgcacgtgctcggcgcatgatcttctcaacagtttgattgatacgagagttcgacccacgcttgtagccagcgcgtttagaatcaccaactttcttttcaactgctttctttgctttagcttgttttgccattataaattctcttttaaatgaaaatgcaggacttattggcattgcctgcgcaagccctcaaggggaacataggtttttggatatttaacgaccaggataaccataaacccgtcatcattcacattcaagaggtacaccgtaaaactgtcggggtcttaaaactataatgattcgcaaatcattaatcagacagttcgacggctcctcgatttagctcacactaaggcagtgaatctccaataaattacttcagtgttaccacaaagtgacgaactgcttttcgtgcagcagaagccagaggcttagcatatttaagttcatctttttcctgaagctcagcagctaatgcagtttgagcaggattcagatgtttgaaataacgcaggatttcaagagcttcggcttcaacatcaatagatgcgccatagttttcgtgaccattattccatgcgtttcgttgcagttcaagagcgtgttgtaattgtttaatcatttaaaaattctcgttagagattaaaactcggtagtcacgttcttctgaatttcatcttctttcgacagatctctcagttgtagactaccacatagaattgttcggttaacttattattccgacacccaattcatattattatttatatcacttataaagacacggaatagctttatagtgacaggtaacgaatttttgtttaatttcttttggctgcttaagacccagagctacaaaaggatgcggaacatttcgaatttgaccaactggaagagaagtcaaatcaccaacttcgcagaaaccttcaggaacatcaggaccgacagagtgaactacacacagttcaggaacttcaccttgaacacgtttaccgataataagtcctgattctgtaacttcttcatcaccggcttgtgcaggttcagaaactaaaataacatattcaccgacagcacgaattggtagctgttgtacttcagacatcgtttttcctttttgttaacagatgaattaataataacaaatagttcttaaagcatttatttaccaataaattgaagcaaatgctcaactttcataccattaacggaaatcaatttgtcaatagaaaaacctcgccacgcaccaagctcaacatcaaatactggaatcatgtcagtagattctttccgagtagattcagtcaatttgccagtttgcatggttggcataaagtctgcatcacgagtacctttcatagtacgaatagtaccatcagacttttcaaaaactacgtttgaaacacccatggacaatttagttttcaaaatttcacgaattgctactttctgctcagttgtcagtttcatttatttacctattacagttttaatatgagttgttccacgttctttaagggtggaaagtaatttttggcatttttctaaatcagatttccaactatatggtctatcaatacaaacccaatttgtcttataatactgtttccatttagagaaaaaatatttcttatactctacagcaaatgagatgttctcgttagaataagaactaattgctgtgagttttaccaaacgaaatttcattattcaccacagaattcgttgatattttcccagtttaacttattcaagtttttcttaggaacattaaacacttcaatacctgcatttcgcagaatatcatcccaaccgggtttatttttgtcgtatgtttcacaataaaccagctttttaataccagattgagctatcgcttttgcgcaatctggacaaggagaaagtgttacatacatagtagcaccttcaatagaagaaccatttcgtgcagcaaacaaaattgcatttagttcagcatgaatttcatttttagatgaccattccgagtgagcactacgatgttctttcgccaaaacaaaacgatcagttgaaccaaatgatacgcattcaggcttatgaccttgaatgatagcatgtttaggcttattcaacaaccatccttgctcagcagcataatcacaacagttcacaccccctgcgggtgaaccattatacccagtagaaataatacgtccattcttttcaattactgctcctaccttccaggagcaacattttgattcctgcgatactaaatatgcaatttgaagtactgtactcgctttcatttcataatcaccagataagcagatttagcagtttcaacacgataaatttcgtgacgaagtttagttatacttttaataacagaactaattatattctgcccatctttaaagcggtttttcttatcaataaaaactgcgccagtcatctttttgtgaagctcaactggatacttcgtcacaataatagcatcatacacagaaggatgaatactattcaccagagtatcattcattaaagttattctaatgaactgtgctgtttcagaatcaagcgctctatgatcgccagtatcattttcaagacaattatcaattatatcagttaaattcatcatagtacgccatacaccctttgtgcttcaactaatccatcaaaatccagtttaagatgcgatatttgatcgccatcacctggattcacaattactaatactgaacgaggagtttcggtaataacacgaaccgatgtttcaggaaatcgttcagaaaccttatttactaattcctgcgcaaatagtttaactttttcttggaattcctttaacagtaatcggtttttcacttagcaacattttgttttcctcatttgttttggtagagctataatatcacaactctaccgtaaagtaaaccattaaatcgctttgaattccgcagtttgagattcaaagcgaatatcgcctttgataacaagctcagcatcaagaccaaatacgacaatgatatgcgcggaacctggatacagtgtaatggcaatagaatccacctggtctggaagcaaagtgttcaatacatgagtcacttgagcatggattcgaagctcagctgcgttatcaagtttttcaaacatattattagcgataatttggctaaacactacttctacgattttagagtaagtcggaaacatatttacctcacataattttcttcaagccaatcaataacatccaacgcattatcaaaagttgaaccatctactctgtcttctgtttcataatcaagaacatctaggcctactcttccgtcaacaataggccatagacaaaatagatatttcttttctttttcaattttatcacaaagacgataaatcttttctaggttattcataagttttccatggtaaaggcagtttagttttctttactactagttcaacatcgggattcttttctcttaatttaagacattcctcccatgctctattttcactagtaaatacacaaaattgcccattactagtaccaactaaaccgctatttacaataacaatagcccaagtttcatggtgccaagccattaaaaatctcccgaagcgacttgccagcattcaacaccgatacgacgccacatttcaactacttgagttcggtcatcaatagctaatttcacgtcaaaatgcggtgcaatgtgtttccagaaaatttcttctttaactacatcgtctttacgggtatcgccttgttcgcgctgacattgcataactaatggaacgccagcaatgtcctcaacccatttacgggtcatacgataatatttcgttgggtcttctttagttccactttcacgacctgaaacgactacgatttgataacccataagagcatacatcttagacagttcaacaaccataggattgataacatcggtatcgcatttttcaaggtcataaggaccacgaccattcattttagctagtgtaccatcaacatcaaaaataactgcttttggtttaccaggagtcccattatatactggaagaccgagatactctcgcatgcttttatacattgaacgtaaaacatcaattggtactgctttagttccgcgttttgagttacgtttaaccaattcagtccaaggaacatcaaacactttatgttcaactttccagccgtattctttggcaaaagtttcccatgctaggcgacgttcaggattcaggttagtatctgaaatgattactcccttaacagaatcgccaccgtacagaatacttttagctgtatcaaactgcataccagttacgataccttctttctttttggtatacttgtactcatcgcgttcttcatgcgccataatagattggcgatagtcatcacgattgatattataaaacccgggattcttagcaataaattcacgagcccaagtactcttaccagaaccaggacagccaatagtcaaaataatctttttcatttattttttctcaactaatgattgaatataatcatgtaggtctttagatgctttaccccacttattttgatattcatttttgagattagcacgtgattgagctaataaaacatcattagttggaggtaaagattctaaccgctgaatctggcgtccataaatcattgcagccatctcggattcataaatcaatcctttgagatgttcaaattgatgccatgaaatcatttacatttatcctcttttagctcttgacgataataacatrtcatagttttctggtcatgtacatatcgttttacatcattaagccaaatacgaaattcctgagaatcttcaaatggcataccgacccaggctttaccatcaataactttaacttgccaagatagtttagcttcatcatatgactttatttgcacaggccaattaggatgaactgtttctttctttacttctagaggctttgtcgaacaaccaactagaagaccaatagataatattactgctgatagtttaatcatttagaaaggtcctggatgtcttctgcgaacttgttgaaggagttgttgatttgtttttcaaccaatcctggcttatgagccaccacatccgccttctttgcatctttgcgcagtttttcattttcacgctcaatagcagcaattgcctcacgatttttattattcatcgcatcaatataattatactgaattcgcaaattatttaatgctaaggcgttttcattggccgtttttgtaatttcagtaactgatgtttctaatctttctaccttatgttttaaaataatagatgttccgccaaatgctattacaagtaatagcaatccagctgtaaaattacttacatgcataaagttttaataacctctacaatatcgtcttgagaaagaccgttaattaaaatatgatgttcagctggagatttagaaattttaaagcatgcctcaacatcttctgccatatccgatgcactacgatttggattactaataccaaggcgatgttttcccgtcaaaggattaacgatgatatagcatttgcagctattgatatgaacattgggttgagtctgattaatgaacacttcacaatcatacttagcaagttgattttctaaaaagactttcatctcttcaaccgcatcaggaagcatatcacgggcttgctcaagacgacgatttcgatattctttaatggtcgttttccgcttgacttgcttagctaaatctttcttaagaccagtgatatatccaactcgacgatttcctttgaatacagaaatcccatctgtagtatcaccgtatgcttcaacgaccatttcagtagtaataagttgtaaatccatcataaagtcctcatgttatgtcagtaagactactataacacaacacgagggacttgtaaacaacttagtatccttctgggataaattttttataatttttcaaaaaattctgttcgatttcacacatgaccttttcttgactatcgtacccctggtataagctcatgatgataccgaacaggtgatccattccagcacctttagcaacaccttgtgcttccattgcataagtctttctatccttaccgcaatgcttattatgacagtcaagaactaaaaacagagctcggtctaagtacttcagataagtcgtttcaaatgcttcaatttttctgtatgaatattcatcgtcagcatacattgctttaagatcatctgatgcaccatcaataatagtcttaaacaatttttctggattatctaatgaactttttgtactatgaagagacacgtaccagtcagacttaattttaaaatgagaaccatctttcatcacagcaacatagccttcgatgttttctgcatttttagcttcttctatccatttagggctatcgatttcgtatcgttcaactagatacggacgaagagtagcatctttataaatatcatcgtatgaaatgtattcacccgtttcgttttcacgaacattcagtaaaataattttcatctcttgataagcaagaacgattctattcgtcggggcaacgaattcgaagttagcagtaaatccatcttcagctaattctttaagtctatcacgcaaccgatggtgattaatattcatcaaaattccattagccattaaagcctgctcagatttgattgaaccctttgatttgaacagaatttcatcaccgtctaaataagttgataccaaagacccgtcttcttttgttagaatataatcaacatcgtttaaatcgatattcatcgtgaacggattttcattcaagttaaaaaacttttccataggacgagaagcaattcttactggtttttctccatccatttcaaacataattccacgacattctagtgcatctggaagtaaccaatcagaataagatgcataattatatgagaaaattctgtaagttcttccagatgcacttacatcatctgagtaaaaaaacttacgctgcgaatccttacatagttccattaaattgttaaaaagttcttgcattgtgtatcctcttttgtgttttgaatatagtaccacactccatgtggaagcatcattttttcttgtgttgaatattccaaggcgggttaaacagtttaatgaatagaggctcctctaagtcaatcgttgcgattgtcattgtacctaactcatttgtcatagaaagattaaaacattggcgggcgtaaaattcaactttgcttccttcctttagcgcagaatgaattaatgcagatttagtagaatcagacgttttgtctttgcggttaatagcagttctataatagtttattcttttacgtaaatttttagtttttccaatataaacaagctcatcatttatagcaatagcataaattacgttatacttgtttggaatagataattgttttatacttccattgtcgtctaattctagctcagtatatttaataaatgaatattctgttgcaatttctttcataataaaatgggccttgcggcccactccttaaaagtattttttaaaactcatcataactttatcatcaacatcattatcaatctgtgcaacaaggtaagatgacagttctacttcttgcggcgcggattgaacattatcagaattaagatattcacgaatccaaggatatggatgtttaaccggagcatcggtaattgggcatggaagaccgcactgtttcatacgagatacagttaagtaatcaataaagctccacatgctatttgtatttaatccaggaacatcaccatctttaaataaatgaactgcccagtctttttcctggcggttaacttccatgaaaatatcaactgcttcttgttcacactcttgggcaattttaacccattcatcaccatcagtaccggattgaagttgacgaataatatattgggtgcctttaaggtgaagctgttcatcacgtgcaatgaacttcataatcttggcattaccttccatgatttccatgttcttatggaagttaaaggtaccgtatgttcgattgagctcgctaattctcaacccgttctcttatgaactgctgcatgttaccatgcagtccagactatatcacaatcccggagggattctccccatttcgagtcgcttgaccctacgtccgaagactagtcgttgaaccttgttttgcaattgtcgccgtgccatcgtttatatgttgatggtgataaatctttcttatcacaatatggacaattcaattgaattctatttggatttaatttacatctgtcattatgttttagataaaatccaggacctttaccaatgtgaccacagaaatcacatgtgatttctttttgtgcaggatgggtcccgttcttaaccatttctaatgtttttgctgatgttcttttcttatgttcttccatcagaatctttaggtataggtccgttagcatctatccaaatttttctatagttcaattgtgcatcctcttaaaagtataatcatatttatattatactaattaaaggtgcaagcaaaaccttggctgctagttttccataaaggactttccagcaattaaaggagttttcgataaacgttaccgtttaaaggcgcattttacgcaaaagatacataaaaacgaatagcttctaaggcattaataacgtgcaaacagaggtaaagagatttcatcagatctcgtttagctctttgctcaacgtctttatcagctagaattagaccttggtctttataatattcaaccatgtctttagcattttcccattcacgggttttaaccaagacatcatcgtaatatcgcccaatggactcagcacgtttcataatagcttcatctaatacaatctcatcaaacaccttcgatggatcagtataaagatttcgcatgatatgagtatatgaacgactgtgaatagtttcactaaaagtccatgtagcaacccatgtatcaaggcttgggtctgaaattaatgacataagtacagcagatggcgcacgaccctgaatgctatccaaaagtgattgatacttcaggttgttagtaaaaatattttgctgatactgaggaagcttattaaattgcgcagcatccatcattaagtttacttcttcaggacgccaaaaaaaactgatctgccgctcaatgagttcttcaaatactcgatgtcgttgaatatcatatcgagctaaacctaatccagaaccaaagaacatcggttcattcaaaacatcaactggatttgtattaaaaactgtactcatttagaatccttaaatttacatttatcataatgccatcttaaagcattgcctttattaactttcttaccacagtgcgggcaaggtggatactctgctccttgtttagttctcaaagaaatcaaatcacgggtttctttagtatgaggaacatctcttgtcggagaaattgtaccatacatcggattaagcacgccgactttagcagcagctatattctttttagcttcttcagttttaggctttctcatctttttcttaggtttcttcgcttttagcccttcctttggttgccgccgatattttgtgtttggtttcttctgttaaacgcagacctgttttcgctttttgacattttcagtctcgtttcttcagaaatgaccgtacctttgcgaaattgcgaatttaacttctttgcatgggcatatattttagaatgaactttataatgacgtttcttagttcctttcatattgcacatcatgaaaaatgcgaatataacagattttaccggataaatctttgataaaatagcatgcgctataaaatgctctctagctgttaattcaactaaattttctttatcatcagaacctcccatgcatctagggattatatgatgtgtctctttatattcggataaaggttcccgagcctgagctcgggaaattaggtcgttatagattttttgataattcattacaatttacacgctgcacaatcatcggctttaggagtttctatttcataatcatcagtaccagaaccatcacgggtattatgataatagaaatttttaatgccataataccatccgtatagcatgtcatcaatcattattgacattggaacctttccttttggaaaaatctgcgggtcataatatgtattcgctgaagctgattgacatacccatttcagcataatagctacctgcgtaagataaggtttattacctttcttagctaatttccatgtataatcatagaggtctatgttatgctcaatattgggcacgacttgattaaaggaaccctcttttgattctttaacacttaccggtccacgtggaggctcgtagccgtttgtactgttagaaacttgggaagatgactcacatggcataagtgctgataatgtgctattacggatgccaaatagcttaaggtcttcccgcagcgccgaccagtcacaaacgtattttggagctgcgatttggtcaatctttttattgtaccagtcgataggtaattcgcctcgagaccaacgagtgtctgaataatattccgaaggtcctttttctttggcgagcttaatggatgctttaatgagtccatactgtaatctctcaaatagttcatgtgttaaatcgttagcatcttcataagaagcaaagttacttgccagccaagctgcatagttggtaacacctacaccgaggttacgacgctttttagctttttctgcttcaggaaccggatatccttggtaatccaacagattatcaagagcacgaacttgaacttctgccaattcattaattttatcttggtcttgccagtcaaaattatctaatacgaatgcagagagagtacacaatccaatttcagcatcagggctattcacatcatttgttggaatagcaatttcacagcacaagttactctgacgaataggtgccttttcacgaataaacggagtatagttattcgtattatcaatgaactgcacataaatccttgctgttcctgaacgttcagtcatgagcaattcaaatagttcacgggctttaatacgctttttacgaatattagggtctttttctgctgcttcgtataattcacggaaacggtcttggtctttaaaataagaataataaagctcgccacccatttcatgcggactgaacaaagtaatgtaatcgttttttccaaaacgttccatcatcaaatcattcagttgaacaccataatccatatgacgaatgcggttttcttctacgcctttgttatttttcaaaacgagaagattttcaacttccaaatgccaaataggataataagcagtagcagcgccgccacgaattccaccctgtgaacatgatttaactgcagtctgaaaatgtttccaaaaaggaataacaccagtatggcgtacttcacccatgccaatcttagaaccttcggcacgaatcataccaacgttaataccaattccagcgcgtttagagatatattcaacaattgaagcagaagccttattgatagacttcaatgaatctcctgcctcaataacaacacatgaactaaactgtcgagtcggagtacgacaaccagccataataggagttggcaatgaaatctgtcgagttgatactgcttcataaaaacggataacatgttttaatctatcaacaggttcatcttgatgcagtgccattccaatagtcataaatgcaaactgtggagtttcataaatttgaccagtggttttatctttaactagatatttttcttttaattgcattgccccggaataagtaaattccatatcccgttcgtgcttaatttttgattctaaaaatgtaatttcttctgctgaatattttgacaataattcagggtcgtatttacctgcatttacacaataagaaatatggtcaataaatgaacgtggttcatactgcccataaacatgcttacgaagagcaaacattaaacagcgtgcagctacatattgataatcaggttcttcaaccgaaatagaattcgcagcagccttaatgacaatagtctgaatatcatcagttgtcattccatcacggagataagatttaatattttcatataattcataaggatctactgatgttccttcagctgcccaagataaaactttaataattttttgtgggtcaaagctctgagaaacaccactacttttgataacattaattaattgcataagtcctcaacttgaaaatcgtctttaaacaatcggttaactatatgagctattatatcaccatgacacggctttggtttacatgtgcatcctagcctcattccacgtaaaggctctaaatgtgctttagttatttctccggatttaattcgacgtataaaatcttttttgaataattcaatggcagcctcccggctgccagcatctttaccgacgtaatttccccaaaatgtaccgcggtgaatattaacatcaaagtcggatttatatttattcactacccggcatagacggcccacgctggaataattcgtcatattgtttttccgttaaaacagtaatatcgtagtaacagtcagaagaagttttaactgtggaaattttattatcaaaatactcacgagtcattttatgagtatagtattttttaccataaatggtaataggctgttctggtcctggaacttctaactcgcttgggttaggaagtgtaaaaagaactacaccagaagtatctttaaatcgtaaaatcatatatcctcgcaataataaaattacaccgccatctttcctttaataggagggtgtgatacatagttgttaagaacgaaatctttaggcctaagtttaagaacatattttaattgttctttagtagaaagatatcggaatttataaggtagaccacttattaccagctcacaaagctctttaggttcacgcctcaaaatttctttacattgttctacgtgattcatatagatatgagtattaccaccagaaaatatcaaatcccctggaataagattacacatcttagctacaatatgaactaacgtagcatatgacgcaatattaaacggtagcattatgttcagataaggtcgttaatcttaccccggaattatatccagctgcatgtcaccatgcagagcagactatatctccaacttgttaaagcaagttgtctatcgtttcgagtcacttgaccctactccccaaagggatagtcgttaggcatttatgtagaaccaattccatttatcagattttacacgataagtaactaatccagacgaaattttaaaatgtctagctgcatctgctgcacaatcaaaaataaccccatcacatgaaatctttttaatattactaggctttttacctttcatcttttctgatattttagatttagttatgtctgaatgcttatgattaaagaatgaattattttcacctgaacgatttctgcatttactacaagtataagcagaagtttgtatgcgaacaccgcacttacaaaacttatgggtttctggattccaacgcccgtttttacttccgggtttactgtaaagagctttccgaccatcaggtccaagtttaagcatcttagctttaacagtttcagaacgtttcttaataatttcttcttttaatggatgcgtagaacatgtatcaccaaacgttgcatcagcaatattgtatccattaattttagaattaagctctttaatccaaaaattttctcgttcaataatcaaatctttctcatatggaatttcttccaaaatagaacattcaaacacattaccatgtttgttaaaagacctctgaagttttatagaagaatggcatcctttttctaaatctttaaaatgcctcttccatctcttttcaaaatctttagcacttcctacatatactttattgtttaaagtatttttaatctgataaattccgcttttcataaatacctctttaaatatagaagtatttattaaagggcaagtcctacaatttagcacgggattgtctactagagaggttccccgtttagatagattacaagtataagtcaccttatactcaggcctcaattaacccaagaaaacatctactgagcgttgataccactgcaaatccaaatagccattacgcacattaaactgatagaacatatgacaaggcggtaatgccatatatttaagttcagctggattccatgcagaaacaatttgacgcctatcatttggcagttttttaatacgatcaataacttctataatttggtctacaccaccaaaatcacgccactgttttccataaattggaccaagttcaccgctatggtatcctaaatcttttgcttgattttcgtaattttcatcccagactgttttgccttggattaacgaatcgtgttgaattaatcgtaaatcattgacatttgtgcttcctgataaaaaccatattagctcagcaatgcaagctttccaggcgagcttcttagttgttaccgcaggaaaacctttagttaaatcccagcgtaatttagatccgaacagagcaattgttcctgtgcctgtacgatcatcggtttcataaccattttcaaaaatgtctttaattaaatcttggtattgtttcatttatatactgattccgtaagggttgttacttcatctattttataccaatgcgtttcaaccatttcacgcttgcttatatcatcaagaaaacttgcgtctaattgaactgttgaattaacacgatgccttttaacgatgcgagaaacaactacttcatctgcataaggtaatgcagcatataacagagcaggcccgccaattacacttactttagaattctgatcaagcatagtttcgaatggtgcattagggcttgacacttgaatttcgccgccagaaatgtaagttatatattgctcccaagtaatatagaaatgtgctaaatcgccgtctttagttacaggataatcacgcgcaaggtcacacaccacaatatggctacgaccaggaagtaatgtaggcaatgactggaacgttttagcacccataatcataattgtgccttcagtacgagctttaaaattctggaggtcctttttaactcgtccccatggtaaaccatcacctaaaccgaatgctaattcattaaagccgtcgaccgttttagttggagaataacggaataccaatttaatcattacgtaaatcctattttaattgaaaacgaatgcttacttggataatttcaatgacatacataatattttcctcaaacagactttttcacaattttccaatcagctttaaactgctcgacgtcagaatggtaaatccaaaatcctgcgctttctccgtcttcataaagaggacatccatcgcattcatcttcccatcccatatcacgtaaaagatgttcagctttttcaacaagttcagaatctttaccgatgatattaaaataccatttacctctaacttctgaatctttgatgctctggcgttgtaatctcattttattctccttagcaagctttaatcaaaagatataaacagaccaacataactgctgccataatataaggtgcgaacattttcttttctccattagttttgatagggtaatagtatcacactactaccctgatgtaaactactttttgaaagtttttcgcaaaagttcaatgatttcatctacattgttttcgtcaacaatgcagtgaatttttgttacgccagaaaccttgtctttgacttcatcttcttcagaagtcggttctttatattcgcggaaacaataaaactcttcttcactaagttcaaaataatcatcacccataccatcatcattatagatttcaccattagcacaaatgatttcggttacataatcaaagccatctaaacttgatattgatttaacttcaaaccaaccgccattttcttgaatgatgccgaccatactagcatttgatgaactaatatcaatgaaagatttaatacgatgtggatttaactcgtattttttgccgatttccattttgattttcctcattttaataggggcttgatagccccttgataattattgttcaatcagtcccatgtaaaattctgcgtcttcagaatccatgccatcacaatattcattagccataaagcgggtgaggtcttcaagaggaccttcaataacgatttgaatactccaaaacttagaatcttgcacgcttgtgatactaagttcaggataacgattacgaataatctcttcaatatattcaaaatcaacgatgtcaatatcaactttagccatattattttcctctttaattattagcagtattgccgatagttgtatagtaccataaagctttatgcttgtaaaccgttttgtgaaaaaatttttaaaataaaaaaggggacctctagggtccccaattaattagtaatataatctattaaaggtcattcaaaaggtcatccaggtccgtgtcatcagcactagatgaactaccagagcttgagctcataaaatcatcttcagtttttgtattgaagtcatcaacattgaatgcatccaaatcatcagccactttatcagctttcttagcagcagttgcagcagcaccgcccatcacagcagttcccataacttgaccgaatttagtattaagttcttcaaacgatttgaatttatctttagaagtcatttcagaaaggtcaaccatttgttcgaacagttctttctggaaagattcatcgtcaatgtttggaatcgcagattgattcaggaatttagattcatcgtagttactaaatccagaaacttgtttaactttcagtacaaagttagcaccttcccacggacaagttacatcaactggagtttcacccatttcaacatcaaccgcaatcattgcattgattttatcccagattttcttaccaaagcggtatttaaatactttaccttcgttttctggagcagctgggtcttttactacaagaatgttagcccagtaagaagttttacgtttaacaagactgtactctttattgtcagtgttgtatagatcatttttactgatgtattgacatactgggcaagaatcgtaatcaccatgggtagatgaacatgtttcaatataccatttaccatttttcttgaaaccgtgatttacaagaattgcgaatggtgcttgttcatcatttttagacggaagaaaacgaattactgcttgaccgttacccgcattatcgagtttcagtttccactcgcctttatcttcagaagaaaaacctttattgccattcagtttagccatttgtgcagcgagttcagcagtagatttacgtttaaacatttttatttcctttttaatttaatttaattaacagttggtgctatgacactttacctcatagctggcataattcgcaatactctgggtcttcgagaggtatccaacctgagttgaaatactttaccatcgatttagcagttgtatcagttatatttatattacctttaactcttcgccatccaggagttttaccgtacagattagaggataataataacacataattctcgtaagcaatatgagataatttccaagactctatattagctcgtgatgttttccaaggtctaaaatcgtcacggttcatataattagccaatctcatatgctctctaacttccgggtctttggctggatgagtttcaccactcacaccaaatccaccaccagcatataccagattaaaatagtctggattatctctggcatttacttcaagttggtattttcgttctgcttcaataacatccaagtcatcatcaatttgaattattttaacgctcggtttttgaagcattagcgcattcaaaaatcttttttgtttacatgagctccagtattcctttccggaagagtcatatattattccgttctcaaatgagcaatttaatttactaccgatatagtagtatggcggagtcttatttttgacacggtcttcaaatgtaaaccaatatactatattcatatcaatacttgcaagatttcacagtttcaatgaaaacatttttagctttctgtgaatcaatatttaaaatttttctataagcctttaactttatagaataattattccagactaaattatcagtctgttcatcatgtttatcaattatatttaaaaacgaatcaagcaagataaacgtctcaaacgaaattatgttcgattgcagaagtttaaaaatataacttgattgaacttttggattatactcaaaaatttctttaaaagcagaaacttcaacttttttactaaaataataaatgttgcgaatatcttcttcaaacttaaatttaatttgctttaagcgtccgatatattcacgataaaacacaagtgcatcagcgtcagagatgtcaccaatccaagcatcttggttagcaaccaaattgcttataaagattaaagcaagttcctttaatttatatttttctgataacttctggaaaaaatacttatcccttcgcttttgataagcggcatcagacacccgcatgcaccaattatacttaattacatcatactttccattcatatgttgttttatcattaagtataatttataaactgatttaccatcaatgtatctttcaccaccagcaggcatgcggagtttaatcatagtagaaaatctaatgtattagttttttcacaacgaacaacagaaggacgtaaaagattttcgtcaatagcttctgactgaattttttcaattatacccgaaggaataaatttagcaaattgagtttcaggaatagaattttcttctaagaatgctgttgtagcttcaagataactcattccaaactcttctaccattttttcaataataaatccattttcttggcggtcaagaagctttgctatttcatccttttctttcttaattgaaagttctttttctgaaagaccggtctcatcgaccggacgaatatcatttagagaaaactgtgtcataaagttcaactacctcttcagtttcagcttcaaacacatcacggttatctttatgatacaaagctaatagacgattaaacatcttaccatcaacgccaagttcatctttagcacgaattcgaatatctttaatcagttcattataaccggaaattttcagtttatgatcagatgcttctttaataaatttagccaagtcttcgccatggatagcttcatcaaattcaaccatttcttttttagccattattcacctcaaaattcattaatgctattagttaatttagaaagacccgcttttacaaaatatgaataaattttgccacgcggtggtaatttatatgaattatagtaattcacaatgtttgaagcaatattatcaggaatataatcaaaatcaattagaactaaattttctttataacgattatattcagattcagtgagaagcaccttagcttgctcacggtcattagcaatagcttcaacgattgaagttttcattgaaggagttcgttcaccttcaactctggtaaaccaaaagtcagatcgtactttaactgaagcaacgttatcctttttgtcgcctttaaggattttagtcatacagtcaatttcagcagaaccgcttttaattttaacccatttcttatgcatcggagaccattgcttaacatttggatatttgtgaagctgagtaaagtcaccatctgacgaaatgattaaaatcttatgtccttctaaagagaactttttaacaagaacagcaatgtggtcatctgcttcatacttatcaatatccataacaatgtatggcatataagctttcaattcatctataactttatggctggattcaaaataaccttcccagtcccaagtagattcttctcgtgcttttccacggtttttcttataataataagcgaaatcacgacgccaatatccagatttcgcgttatcaatacacagtacaattttagtgtatccaagcgtttttgcttttttgacattaaacttaattgagttcaatatcaaatgacgaaccattgataaattaattttttctttatctgggaagtttaccaaagcagttgaaagcgcaatttgactaaagtcaattaagcagattccttctttgtaatcttcatccaacatcatttctaaatccatatgaacctcgttcaattagtgagatttctattatataccatccaaatcttaaagtaaacaagtataaatacttattattgaaaacacaataggagcccgggagaatggccgagattaaaagagaattcagagcagaagatggtctggacgcaggtggtgataaaataatcaacgtagctttagctgatcgtaccgtaggaactgacggtgttaacgttgattacttaattcaagaaaacacagttcaacagtatgatccaactcgtggatatttaaaagattttgtaatcatttatgataaccgcttttgggctgctataaatgatattccaaaaccagcaggagcttttaatagcggacgctggagagcattacgtaccgatgctaactggattacggtttcatctggttcatatcaattaaaatctggtgaagcaatttcggttaacaccgcagctggaaatgacatcacgtttactttaccatcttctccaattgatggtgatactatcgttctccaagatattggaggaaaacctggagttaaccaagttttaattgtagctccagtacaaagtattgtaaactttagaggtgaacaggtacgttcagtactaatgactcatccaaagtcacagctagttttaatttttagtaatcgtctgtggcaaatgtatgttgctgattatagtagagaagctatagttgtaacaccagcgaatacttatcaagcgcaatccaacgattttatcgtacgtagatttacttctgctgcaccaattaatgtcaaacttccaagatttgctaatcatggcgatattattaatttcgtcgatttagataaactaaatccgctttatcatacaattgttactacatacgatgaaacgacttcagtacaagaagttggaactcattccattgaaggccgtacatcgattgacggtttcttgatgtttgatgataatgagaaattatggagactgtttgacggggatagtaaagcgcgtttacgtatcataacgactaattcaaacattcgtccaaatgaagaagttatggtatttggtgcgaataacggaacaactcaaacaattgagcttaagcttccaactaatatttctgttggtgatactgttaaaatttccatgaattacatgagaaaaggacaaacagttaaaatcaaagctgctgatgaagataaaattgcttcttcagttcaattgctgcaattcccaaaacgctcagaatatccacctgaagctgaatgggttacagttcaagaattagtttttaacgatgaaactaattatgttccagttttggagcttgcttacatagaagattctgatggaaaatattgggttgtacagcaaaacgttccaactgtagaaagagtagattctttaaatgattctactagagcaagattaggcgtaattgctttagctacacaagctcaagctaatgtcgatttagaaaattctccacaaaaagaattagcaattactccagaaacgttagctaatcgtactgctacagaaactcgcagaggtattgcaagaatagcaactactgctcaagtgaatcagaacaccacattctcttttgctgatgatattatcatcactcctaaaaagctgaatgaaagaactgctacagaaactcgtagaggtgtcgcagaaattgctacgcagcaagaaactaatgcaggaaccgatgatactacaatcatcactcctaaaaagcttcaagctcgtcaaggttctgaatcattatctggtattgtaacctttgtatctactgcaggtgctactccagcttctagccgtgaattaaatggtacgaatgtttataataaaaacactgataatttagttgtttcacctaaagctttggatcagtataaagctactccaacacagcaaggtgcagtaattttagcagttgaaagtgaagtaattgctggacaaagtcagcaaggatgggcaaatgctgttgtaacgccagaaacgttacataaaaagacatcaactgatggaagaattggtttaattgaaattgctacgcaaagtgaagttaatacaggaactgattatactcgtgcagtcactcctaaaactttaaatgaccgtagagcaactgaaagtttaagtggtatagctgaaattgctacacaagttgaattcgacgcaggcgtcgacgatactcgtatctctacaccattaaaaattaaaaccagatttaatagtactgatcgtacttctgttgttgctctatctggattagttgaatcaggaactctctgggaccattatacacttaatattcttgaagcaaatgagacacaacgtggtacacttcgtgtagctacgcaggtcgaagctgctgcgggaacattagataatgttttaataactcctaaaaagcttttaggtactaaatctactgaagcgcaagagggtgttattaaagttgcaactcagtctgaaactgtgactggaacgtcagcaaatactgctgtatctccaaaaaatttaaaatggattgcgcagagtgaacctacttgggcagctactactgcaataagaggttttgttaaaacttcatctggttcaattacattcgttggtaatgatacagtcggttctacccaagatttagaactgtatgagaaaaatagctatgcggtatcaccatatgaattaaaccgtgtattagcaaattatttgccactaaaagcaaaagctgctgatacaaatttattggatggtctagattcatctcagttcattcgtagggatattgcacagacggttaatggttcactaaccttaacccaacaaacgaatctgagtgcccctcttgtatcatctagtactggtgaatttggtggttcattggccgctaatagaacatttaccatccgtaatacaggagccccgactagtatcgttttcgaaaaaggtcctgcatccggggcaaatcctgcacagtcaatgagtattcgtgtatggggtaaccaatttggcggcggtagtgatacgacccgttcgacagtgtttgaagttggcgatgacacatctcatcacttttattctcaacgtaataaagacggtaatatagcgtttaacattaatggtactgtaatgccaataaacattaatgcttccggtttgatgaatgtgaatggcactgcaacattcggtcgttcagttacagccaatggtgaattcatcagcaagtctgcaaatgcttttagagcaataaacggtgattacggattctttattcgtaatgatgcctctaatacctattttttgctcactgcagccggtgatcagactggtggttttaatggattacgcccattattaattaataatcaatccggtcagattacaattggtgaaggcttaatcattgccaaaggtgttactataaattcaggcggtttaactgttaactcgagaattcgttctcagggtactaaaacatctgatttatatacccgtgcgccaacatctgatactgtaggattctggtcaatcgatattaatgattcagccacttataaccagttcccgggttattttaaaatggttgaaaaaactaatgaagtgactgggcttccatacttagaacgtggcgaagaagttaaatctcctggtacactgactcagtttggtaacacacttgattcgctttaccaagattggattacttatccaacgacgccagaagcgcgtaccactcgctggacacgtacatggcagaaaaccaaaaactcttggtcaagttttgttcaggtatttgacggaggtaaccctcctcaaccatctgatatcggtgctttaccatctgataatgctacaatggggaatcttactattcgtgatttcttgcgaattggtaatgttcgcattgttcctgacccagtgaataaaacggttaaatttgaatgggttgaataagaggtattatggaaaaatttatggccgagtttggacaaggatatgtccaaacgccatttttatcggaaagtaattcagtaagatataaaataagtatagcgggttcttgcccgctttctacagcaggaccatcatatgttaaatttcaggataatcctgtaggaagtcaaacatttagcgcaggcctccatttaagagtttttgacccttccaccggagcattagttgatagtaagtcatatgccttttcgacttcaaatgatactacatcagctgcttttgttagtttcatgaattctttgacgaataatcgaattgttgctatattaactagtggaaaggttaattttcctcctgaagtagtatcttggttaagaaccgccggaacgtctgcctttccatctgattctatattgtcaagatttgacgtatcatatgctgctttttatacttcttctaaaagagctatcgcattagagcatgttaaactgagtaatagaaaaagcacagatgattatcaaactattttagatgttgtatttgacagtttagaagatgtaggggctaccgggtttccaagaggaacgtatgaaagtgttgagcaattcatgtcggcagttggtggaactaatgacgaaattgcgagattgccaacttcagctgctataagtaaattatctgattataatttaattcctggagatgttctttatcttaaagctcagttatatgctgatgctgatttacttgctcttggaactacaaatatatctatccgtttttataatgcatctaacggatatatttcttcaacacaagctgaatttactgggcaagctgggtcatgggaattaaaggaagattatgtagttgttccagaaaacgcagtaggatttacgatatacgcacagagaactgcacaagctggccaaggtggcatgagaaatttaagcttttctgaagtatcaagaaatggcggcatttcgaaacctgctgaatttggcgtcaatggtattcgtgttaattatatctgcgaatccgcttcacccccggatataatggtacttcctacgcaagcatcgtctaaaactggtaaagtgtttgggcaagaatttagagaagtttaaattgagggacccttcgggttccctttttctttataaatactattcaaataaaggggcatacaatggctgatttaaaagtaggttcaacaactggaggctctgtcatttggcatcaaggaaattttccattgaatccagccggtgacgatgtactctataaatcatttaaaatatattcagaatataacaaaccacaagctgctgataacgatttcgtttctaaagctaatggtggtacttatgcatcaaaggtaacatttaacgctggcattcaagtcccatatgctccaaacatcatgagcccatgcgggatttatgggggtaacggtgatggtgctacttttgataaagcaaatatcgatattgtttcatggtatggcgtaggatttaaatcgtcatttggttcaacaggccgaactgttgtaattaatacacgcaatggtgatattaacacaaaaggtgttgtgtcggcagctggtcaagtaagaagtggtgcggctgctcctatagcagcgaatgaccttactagaaaggactatgttgatggagcaataaatactgttactgcaaatgcaaactctagggtgctacggtctggtgacaccatgacaggtaatttaacagcgccaaactttttctcgcagaatcctgcatctcaaccctcacacgttccacgatttgaccaaatcgtaattaaggattctgttcaagatttcggctattattaagaggacttatggctactttaaaacaaatacaatttaaaagaagcaaaatcgcaggaacacgtcctgctgcttcagtattagccgaaggtgaattggctataaacttaaaagatagaacaatttttactaaagatgattcaggaaatatcatcgatctaggttttgctaaaggcgggcaagttgatggcaacgttactattaacggacttttgagattaaatggcgattatgtacaaacaggtggaatgactgtaaacggacccattggttctactgatggcgtcactggaaaaattttcagatctacacagggttcattttatgcaagagcaacaaacgatacttcaaatgcccatttatggtttgaaaatgccgatggcactgaacgtggcgttatatatgctcgccctcaaactacaactgacggtgaaatacgccttagggttagacaaggaacaggaagcactgccaacagtgaattctatttccgctctataaatggaggcgaatttcaggctaaccgtattttagcatcagattcgttagtaacaaaacgcattgcggttgataccgttattcatgatgccaaagcatttggacaatatgattctcactctttggttaattatgtttatcctggaaccggtgaaacaaatggtgtaaactatcttcgtaaagttcgcgctaagtccggtggtacaatttatcatgaaattgttactgcacaaacaggcctggctgatgaagtttcttggtggtctggtgatacaccagtatttaaactatacggtattcgtgacgatggcagaatgattatccgtaatagccttgcattaggtacattcactacaaatttcccgtctagtgattatggcaacgtcggtgtaatgggcgataagtatcttgttctcggcgacactgtaactggcttgtcatacaaaaaaactggtgtatttgatctagttggcggtggatattctgttgcttctattactcctgacagtttccgtagtactcgtaaaggtatatttggtcgttctgaggaccaaggcgcaacttggataatgcctggtacaaatgctgctctcttgtctgttcaaacacaagctgataataacaatgctggagacggacaaacccatatcgggtacaatgctggcggtaaaatgaaccactatttccgtggtacaggtcagatgaatatcaatacccaacaaggtatggaaattaacccgggtattttgaaattggtaactggctctaataatgtacaattttacgctgacggaactatttcttccattcaacctattaaattagataacgagatatttttaactaaatctaataatactgcgggtcttaaatttggagctcctagccaagttgatggcacaaggactatccaatggaacggtggtactcgcgaaggacagaataaaaactatgtgattattaaagcatggggtaactcatttaatgccactggtgatagatctcgcgaaacggttttccaagtatcagatagtcaaggatattatttttatgctcatcgtaaagctccaaccggcgacgaaactattggacgtattgaagctcaatttgctggggatgtttatgctaaaggtattattgccaacggaaattttagagttgttgggtcaagcgctttagccggcaatgttactatgtctaacggtttgtttgtccaaggtggttcttctattactggacaagttaaaattggcggaacagcaaacgcactgagaatttggaacgctgaatatggtgctattttccgtcgttcggaaagtaacttttatattattccaaccaatcaaaatgaaggagaaagtggagacattcacagctctttgagacctgtgagaataggattaaacgatggcatggttgggttaggaagagattcttttatagtagatcaaaataatgctttaactacgataaacagtaactctcgcattaatgccaactttagaatgcaattggggcagtcggcatacattgatgcagaatgtactgatgctgttcgcccggcgggtgcaggttcatttgcttcccagaataatgaagacgtccgtgcgccgttctatatgaatattgatagaactgatgctagtgcatatgttcctattttgaaacaacgttatgttcaaggcaatggctgctattcattagggactttaattaataatggtaatttccgagttcattaccatggcggcggagataacggttctacaggtccacagactgctgattttggatgggaatttattaaaaacggtgattttatttcacctcgcgatttaatagcaggcaaagtcagatttgatagaactggtaatatcactggtggttctggtaattttgctaacttaaacagtacaattgaatcacttaaaactgatatcatgtcgagttacccaattggtgctccgattccttggccgagtgattcagttcctgctggatttgctttgatggaaggtcagacctttgataagtccgcatatccaaagttagctgttgcatatcctagcggtgttattccagatatgcgcgggcaaactatcaagggtaaaccaagtggtcgtgctgttttgagcgctgaggcagatggtgttaaggctcatagccatagtgcatcggcttcaagtactgacttaggtactaaaaccacatcaagctttgactatggtacgaagggaactaacagtacgggtggacacactcactctggtagtggttctactagcacaaatggtgagcacagccactacatcgaggcatggaatggtactggtgtaggtggtaataagatgtcatcatatgccatatcatacagggcgggtgggagtaacactaatgcagcagggaaccacagtcacactttctcttttgggactagcagtgctggcgaccattcccactctgtaggtattggtgctcatacccacacggtagcaattggatcacatggtcatactatcactgtaaatagtacaggtaatacagaaaacacggttaaaaacattgcttttaactatatcgttcgtttagcataaggagaggggcttcggcccttctaaatatgaaaatatatcattattattttgacactaaagaattttacaaagaagaaaattacaaaccggttaaaggcctcggtcttcctgctcattcaacaattaaaaaacctttagaacctaaagaaggatacgcggttgtatttgatgaacgtactcaggattggatttatgaagaagaccatcgcggaaaacgcgcatggacttttaataaagaagaaatttttataagtgacattggaagcccggttggtataactttcgatgagcccggcgaatttgatatatggactgatgacggttggaaagaagacgaaacatataagcgagttttaattcgtaatagaaaaattgaagaattatataaagagttccaagttttaaataatatgattgaagcttctgtcgccaataaaaaggaaaaattctattataaaaaccttaagcggttctttgctcttttagaaaagcatgagcatttaggtggtgaattcccttcatggcctgaaaaagaacagaagccttggtataagcgtttattcaagcattacgtataaatatcttaaaaggagggtctatggcagcacctagaatatcattttcgccctctgatattctatttggtgttctagatcgcttgttcaaagataacgctaccgggaaggttcttgcttcccgggtagctgtcgtaattcttttgtttataatggcgattgtttggtataggggagatagtttctttgagtactataagcaatcaaagtatgaaacatacagtgaaattattgaaaaggaaagaactgcacgctttgaatctgtcgccctggaacaactccagatagttcatatatcatctgaggcagactttagtgcggtgtattctttccgccctaaaaacttaaactattttgttgatattatagcatacgaaggaaaattaccttcaacaataagtgaaaaatcacttggaggatatcctgttgataaaactatggatgaatatacagttcatttaaatggacgtcattattattccaactcaaaatttgcttttttaccaactaaaaagcctactcccgaaataaactacatgtacagttgtccatattttaatttggataatatctatgctggaacgataaccatgtactggtatagaaatgatcatataagtaatgaccgccttgaatcaatatgtgctcaggcggccagaatattaggaagggctaaataattatttgttcgtatacatctctagatatcgatatacaccctcaaaaccctcgttgaattcgtcgatgagggttttcttatcttcttgagttaattcagaaacaattttacggaatgaattttgatttaactttctaccttcatgcgttactccaatctcatttagaaatgcaataaaattagcacgattctcaacaatatcttctctggaaaatttaatcaaaatagatgcaacagtaataatttcacgaactgtatcaatgtttttattcattaactataccactcaattagttgactttgttataatatcatcagacgcttgatttgtaaactggtctgtgtaattttcttcaaaaattttttctacgaattccttgaacgattcacgttcctgagctacattatgctcgattaccttttcaagattatgactcattcgaaataatcttcaatttcataatcatggacataaatcattatagtttttaatacatcatcaatattttttcctggagctggaattacgtaaaaataccctgcttttgagaggtctttataagttccaatcaagaaatcattattctcaagatgtaactcttcaactaattcattgacaattgaatggtataggtttggcagaaacttatatagcttttctagaatatcaattttgaatgtatattgaaccacggactgagaatcaataatcatagaccttccccttatgtttctgtttgcgattagattctttaaacgctttcttcttatccttatgaacagaagctttattaaaattatgctttgcgactaaattgttcatagtgctgaattacctctcttaaacatttgcatgtgaatgaaaactttttagctacaccacattcaaatatatgttctcttaaatcgcgtgtatcggtatatcccatctcaacaataaaatgccgtattagatttttatctttatcgtttagagaattaaaataatcagattttgaattaatttccctggccaaattgaatcaccttcagttgacgttttaactcttttatcatctcttcgttcatcgcaatataaagatcgcgtagagcaggttttagcattccatttactggagaactaaatggacatacataatcttttcctacgagctttttagtgaattccatatcacagaactgaaatcccggctcattggtataaattccccaattagttgacatcattttattggcatattccagtgcctggatttgattcataattccatcaatttgaaactttttaatattcattagtaaaggtcctcagagtaaagttctttttcactaccacgttcaatacttacttgtccagcgtaagttgcaataatcattgcttcttcacgtgtccaataattactatattggtcaataaacccttggtcatcatcacaaacttgctgagtaactaattgaggtttaactacatctaaaacttctgccatatctttagaataatgacgagcacctggaataataagagttcgtccatcttttaatttaaaacggttggctgcgcaaacaattcgtcgttgatacttttggttttcatcccagtacgcagtctgccaacagatttcaggaacttctttcagaatatcttcttctgtgcatttataaccatgcgctttaaatttttcaacaagactttctggagtttcacgagataaaggaacattcagcatttttaaacgattgataaatgggttcatttaaaccatcctttaatacgctgccacaaagttttctgttgagctttgttgacgccaattgagcgaataaccggttgagattcctggaattctttataatcagcaaggtaaatttcgtaagctgcatccgtaaatgaacttatcgctgccataaaattattgcgaatacctactggagcatctttactttcacgaatgatcatgtatttaccagtcttaatctttacgatagttccaagataagctccatggtaccaaatatcccaaccctcttgagtaggttctgcgcaacgacgaagttcattgacaatttctaacttgtttattatttattcctcacagttcagatgctacagtgattacagcttcaatgttttctgccgagcgtttaatgtcaagatacacattaccgtttttagcgattttacatgacattccgatgtcagtaaatttctgaatatgatgttccatcattttgtatccaaaaattcgcatatttccattgttattaatttcaaaattacgaattccgttagtgcgtttttctaaaatagcaagataattactacgataaatttcaacctttttaagaacaaatccatttttatctaaaagttttaacatgaggtctttatcttcttccatatcggaagtaatctcgcgagctttacgagttgctcgttttttcagcagttccggagcattttcctgtgcatataaagttgctgcatttgaaataatatcctgagcttcaccagtaatgattaatccatcaccagatttctccaccaggccttttttaatcaataccccaatattactattaactactgcgttacctaaatctggatgcacctcacgaacttctgcagctgtaatgaaatctttcttagcaatggtaattaaaatcgtagcagttttttcattcagaacatcgttagaagctttgatgatgtaagttactttagacattttctaatctccgtaattctgtatcagtagttgatagttgtatagtaccacagtatgctttggttgtaaaccgttttgtgaaaaaatttttaaaataaaaaagggagagcctcggctctccctaaaattactgcatgactgtgataactgtcatgataacacgttgaattccgaacgcaagaagacctcctgctacggctggaacaacgcctaaacccgccagtaaaatgctaccagatactaatgcagcgcttgtaataccaatgaatggactcatttgatttcctctaaatctttggtgtattcagtaactacatcagtagttttccaatattcgttttcttcttttttagctttagcttcttcagcaagtttctttgcttcatcggaagtcatatgaaaaatattcattccaactagtttatcaacataagaagaatacatatcgattttcgaaagttcttcggtcagttctttacgagttttaccctgtacaacaatttcacctgaaattactttcttaatgaaatgtgctttggcaaaggctaaacgaaaagctgactcagtttctttaattttgttatcaattcgtttttggacataagttttacgaacttcaacaaagtctttaattaaatcaactacgttatcgtaaacttgcagctttcctttctcattaataaccgtaatattctgggaacgacgctcaatcagtccgaagtctttcataatttttgcatggcgttcttcttcgttatcgctcaaagaatattctttgcggaatttaactttgaagccaaaaccatgctcaccacaagcatcatcccatgtaatgaagcctttattttcaagtgggtctaagattttactcacataagtttcacgatcatacttatacggaatctcagtgatatgcatttgagttcgtgaagtaaacttatatgttccacgaatttcatattgcccatcaatttcaacgacttcaccacgaaattctgggaattctactttcggtttagttactttctttccttgaagagcttgcagtacagctttcttgacagaagaaacactatgaggaagaatgtaagttgcataaccagttgcaataccggaaacgccattaagaagaacagtaggaataataggcaaatagaaagcaggcggaatgtgttctttatcttgatgtaccggagcatattcagtatctttatatacgttatagaaatttttacttacacgagcaaaaatataacgacttgccgctgccttttggacagtacgagaaccaaagtttccttgaccatctaacagaggaaagttattattccaagtattagccatcaaagcacctgcgtcttgtgcagagttttcaccatgatgatatccaaggtccgctacaccacctgcaatagaagcgagtttgtgaaacttatctttatttcctcgtgccaaatcaagagctcgagcaataacaaatcgttgaactggcttaaatccatcaatcatatttgggatagcacgattttcaaccgtgtacatagcataagccaatgcttcattatcaatgatactttttaaatcgcgattattcagttgcataaatttaccatactagtgaatgtagtgccataataacatcagaaatgaaaagcacgacttgaattaatccgaacattactccgtaatatagtgctaccaataaagcagcaagggctaatgaatagcccaagattttcttaatcattagataacaacacaaatgttaaatatgcacacataccctgggctaaagcttgtgaaaacacactgctagcatcgatacagatagttaaaacacatgctactatccaacaaataaatgaaataactcctaataattttgcaatattcatattttcctcactggcgtccgaagacgcctttagttttaagattgttacgatagaactgcatcacgtgttcgttatggaaattactcattaatatgcctgtaaaacaaatttaaagttatcagccaacatacggttcatttcttcgagtgtttgatactcagaatgatgattacgagtaaacgccaaagctagctgaccttttccaaatcccgtcgttagaggtttcatcttagaagcaggcagataaaacactgtgtatggaacattgttatttgcaatagtacgcgcaagttgagaccggcgttgacgaatatgacttaaaaccgcactgaatccttgcttagaacgctgattacctacataaaatcgtgcagatacgcatggattactaaatggaccaccgagtttactcactaaaaagtaaaatccaggtttagataaaatatctttatgcggagttcctaaaaaccattcaccacccttgattgtaccaataacagtagcgcctgcatcattcagatcagtaacagtcatatatttcatattaatttcctctaaattattttctactccaaggccgcatgaatacacacggccattaaattactcgtcgcagtcgacgctcaattcccaaaactcttctacagtataagtttcagtatcattttcaatacagaaacgttcattactattatttgctaaagtagcattaactgtcattttttcgctagtgctcttaagaggtgaaatacgaattaactgatcaccgttatctaaacaaaaaatttcaccaacttttacatctttaaaacttttcataattcacctcaaggagtataaaatccaaatgcagttgttgaccatcccatccaatatggaaaatttacaccaatgtaaaacataagaatataaaaccaaccgctcagcaaattcatcattttacaccattccaaattgtttcaaccacggattttaaaccattttgatgaatatccattcctactaccgccatcaaataaattccaactacaactgaacctaaggcaaaaatcagcatgaaaatgaataaagccggaaaaatattatcgaaaaaccattcaataaatgtaaaagcactgcgtttacgttcatattttcctcacataaatccaaagtaaacgtttaatacatcaatcattaaaacgattgggaatatactcaaaactattagtattataactacattccatatagctttaataatctttttcattttctgttcctccatagttgatagggtaatagtaccacggaagaacagtcttgtaaacaacttttttaaaaatattcgtaataaatgtgaataccaactactaccgctgaaacctgtgcaacccaccacgcacaagcaataagtacagaattcaaaattttcataataacctcattacaaaagtaaatgttaaacaaattactggaatactaattaaccaaacaaaacaccaccataatgaactcatagttcaatctcagcgattttcattttattctccaaatccgtatcagtagttgatagttgtatagtaccacggtccttgtggtatgtaaactgttttgtgaaattttttaaatggaaagataccatccgttgtagttgctttttcttacaactttacgaaggtcttctctgtcaccgatgaacttcggagtgtactggatgacacctggatgaatttctttagtgttgaatataattatacagtcagcgacttgatgatttagaatgggccctagatttattccagaaccatatggatactctccgctgcatcccgttgttaccgaaatccaacgtgagtcagtttgatgtgtcttaacttctacacgaagcccgcagtattttggatgagccaatacatcccatgcatatgtgtacggatcatcgacatcctcttggcctttattgacatatccactcaaccaatctgccacaaaaaactctgcgtacacagcgatacggcatctttcgataacttctgccttatcttgatttgggttttgttttaaagagtatcttgcagtatcagcaattttgaccttcatttcacaggtcaagtcactgttcgatagggtaaatgtcggaatctgaaatagtctctgtaacccaggattcgttttctgcatttaaactttcctttatgtcggaatcaccgatattcatataaatcataatttctcttaaaacaaaaggccgaagccctttattttacttgaattgtgcaattcttttctctagacattcagcataagatttcattgagatgaactgcgaaagtagcagttcttgctcaactgcgctaactgttagaaactttgcgctttctaaaaatttgctcagtgcattaattttgagcattaattgatcgtattcttcttttactcgtgcttgataagctaacataattttccttagttaagggccgaagccttatttaaattgttcagtaacgtcttcaactacttcatattggcaggtacgcattttagcatcgttgtaatcaatcggaattgatactacatcgcgaggatgaactttaacttttacaactcggctggttgaactaccaaagtgacgaatataagatttagaacacacatgcaaaccacgagaacaagtttgtgtatcatcgtcattcacacgagtacgtggcattttaactactttacccggactgttatcaaaggtgtttgagtgacagtcaaagtaattgctgcgaactactttccaagcatagaagtaaccatcttctgtaatttcaatatcgtttgctaccaagaaatcaaagagtcgagataccgctttttggcttgggttttccaacagattttccaagaacggaaaataaaattcaaagttttcgcctttttccatcgagtcaagaatacgatcaaccaaaccagaccgcaattcaatattttgatagaacaagcttccaccttcaattcgaacatcgccggaaatatatttttcaacagcacgacgaacattaattttttgtgccgcttcttccaacttatccgctacaagcagattaagaatttcctggaagtttgaatgagtattaggagttgcgttataagttacgccatcaacagtaattgaaatgaattttttagatgcattccaaataatgtcagatttagcaactggagcaataactgcatcgctattaactttaactgtaatatcaccgctaatagtaactttagggcgtttagcttcttcagcatttttcaaaacacgacggattgtgtcaaccgatacaccttgccaatcagccaattcctgttgggtgtaattaccacttgaatacagtttaacaatttcagcttgttcgtttttggtcaggcatttaatattgtacat

SEQ ID NO: 6 - DNA, 32 bp, synthetic construct
  source 1..32: mol_type = other DNA
cgaatgaccaggcatttaccgaccagcccatc

SEQ ID NO: 7 - DNA, 32 bp, synthetic construct
  source 1..32: mol_type = other DNA
agtgggaagggttgcaggacaccgtctttgcc

SEQ ID NO: 8 - DNA, 32 bp, synthetic construct
  source 1..32: mol_type = other DNA
ccgatgttaccttcctgaatcaaatccgcctg

SEQ ID NO: 9 - DNA, 32 bp, synthetic construct
  source 1..32: mol_type = other DNA
tgattgacggctacggtaaaccggcaacgttc

SEQ ID NO: 10 - DNA, 32 bp, synthetic construct
  source 1..32: mol_type = other DNA
gctgttaacgtacgtaccgcgccgcatccggc

SEQ ID NO: 11 - DNA, 163825 bp, Escherichia phage T2
  source 1..163825: mol_type = genomic DNA
aattttccttattaggccgcaagggccttcatagttttagcgatttgagaaacttcatcatcacttaaagagttgcgatatccgatgaagtcggaaacaatacggaatttcttggtaaactcagcaaccattttatcactgttttttgaagcattatttgataatacatcaaaaagattagttactgtccagatgtcatgaccaatggtatcttttccaccattaaaatatacaccctgtaatgaactaaccatattagcgagtcgtgtatattcttcagaaacttcatctacactgaagtacttcatcataaaatctagctcaggatacttgataattttatcaatatatcgtttagctgaacttgaataacctacatacttatcataatctacatcatcaaaagcatctacatataaatcgcgtagagtttcaaaaatacattggcactgaccgagttcttttacctttttctgtaaaagcggacgaataacataaaattcattaatgccaataagattagccatacgaatcaaaatattcatagatggattacaaagagatgtagtaccatccatagagaaaatatcagaacgatgcatatacgctacataaccagtaatttcatctgcttctgacgtaagtgtaaatagttcctctttttcccagcgcccgtctttaatttcaaacttaaatgctgtagcagctttaggacgaggagctttacttttaactacctttggaatatagcttttaactaaagcttcgatttctgacaaataatgaatgttaacttcatcactttcaaacattgccataatatcaggaagcaaatcaatctgcgattctacttctgggttaataaacagaagacgctcattgtgatgaatattcaaagtgttattaaattcactatcatctaacgcacgtgctaatccacggacaatattaacacgatttttaatattatcaataacaatattaatttttgttgtattaataccaaacagacgataacttgatgcaacggctgaagtttcatgactttgcttaatgcgcttcagtcgagggtcaagatttacttcatacacaactcctgcattgcataacttactatcaggttcaaacatactctgcatcttcttatatgacagatttttagtcgtgaatttgactgaattactaatcatataatctcgagcagaataccccatcttcatcaattcacgatatgtgtgacgaggagatgtagattctttaaatcgttttacatcttcattaaatgcttgctcactgagttctttaactcgctcaataatatttttacgagtacgatcatcaagtgaaagagcctcgcgagatggagcaatatcaagtgaacccattggaaacttaatgtaattcacttcattgcgaatgcttaaccagttgcggtctctaataacaccatcaataggataaacaataccgccatagatagcatataatccaccacgatcaggccagtatctttctggatttacgccgtaataatcatcaaaatccggaaaatagtcaatttcacggtcaagactattaatgatagccaaatctttgaacggccgcatgatataagaaacttcataagcaaagtttctaaagtctttttcttcaactggaactacgatttcaatgccagttttatcatctggacccatttcttttacgaatgtaggtttaatctgtgggccatcaccatccatgtaagctacataaccacgaatttcacctttatggtatgaagtaatactaaacgtatcagtataactaaacggagatttagaacctaaaccaaatccaccaatgaaatcattagattcagctttagatgaactgaagtatgaattatacagcccaggagaattatcatcaccctgaatatcaaaatcactcatacccggaccaaaatctcgacaaacaaatcgcggatctaatcgtcctggaacttgaatgataaatttttcaggatttccattgagagcatgggcatcaatcatgttagtaatcaattcacggactactgcgcgaattttgtttgtatacaaatcagatgacagaattttaaatactttaggagatgctgtgatgctaaatgcttttgatttagaaccattaccaagaattgtttctttttcagtggtgataatcataatttcctcattaattcatattacgcttaataacttcagcaacttctagtaattcatctttagttgcggtgtcggattgaattttatctctaatatccttaaagcggtttttaaattcttcggcttctcccatatcgaaaaagcgttgaatgattctatattctcgatgaactgctttatcaaaaagttctaaatttactctatatgatttcatttcaatatcctcatttgcccaattaattataccacatccttgtggtaaagtaaactactggctcatccattctttacgaaggtcagcattatctcccatgagcatttcaaaaagctctttccagttctcaggaagtttaacaacatcatatactggattttgaatcatttcacgatattcagatttttccaaagagccaagtcctttaatataacggatgctatgtttaggtagagcatctttggcactctcatattcagcgactgtataaaaccattcttgttttttaccgacctgagcgatgattacaggagttttgacaaagcgaattcgtccttgctcaaacaattctggccaattactaaaaaatccgagcagagaaggataaatgcttcctagaccatcatggtcagcatcagtcataatagcaatattatgataattcaagttttcagctttttcaccaagaactagaccagtgattgcgcaaatatcaaatagttctttgtttttaagcatatcggcatatgacataccccagctattaagaactttaccacgcaatggataaccaccatgaagttctttatcacgaacatcaataagatatccgatagcagaatcaccctcagtcaagaaaagagtagtatcagcatctttaccacaaagattcgctttgatatgtttatgaaccttagctttagaagcttttttagctgcctttgtctctgctgctttttccgccgccaatttacgagctaatgctgcttcaataattggcattaaaattgcttcattatttagaatagcgcgtgaaatctttttagcatcaagttgaatatgactacgaatttcaccaaaaggagaagtaagtcgttctttagtttgagagtcaaatcgcatgtttttcatatcgcgaacaaacataacgatagtcaaacattctttaacacgtgctttagttacatcaattttgaatttacgtttgatttgtggaataaggtcttcacaaatatcatccataacacagtcaatatgatggccaccattcttagtatgaatgttattgacgtacgtcaactgacgaaaaccatccggtgaacgaccaaccgcaatagaacaattttcttgttcttgaacaatagcatgttcatcatactgtcgtgcatatttcttaaaattgccctgaacctttttaccattaaaggtaaattgaatatcaggataaactacagcaagcgtctggagacgatcaagtgtaatgtcaagataaacttgggacagctcattagtttcaaatgacataaaatcaggaatgaaagtaacacgagttcctttccattttccaggaatatcttcccatgatttattttccatgccatttgaacaacgaactacaatattattttgaccatcgccagtttcaccgacaaacatcacagaaaaaatgtttgtcaaactagaaccaacaccattcataccaccggtgacgcgttctttatcatcaccaaagttaccacctgcttttggaatagtccatgcagcaactggaccaggaatttcttcaccagtaggtgttttaaccatcgcttgtggaataccacgaccgttatcttcaactgttacttgattgtttttaatagtaacattaattttatttgctaatttaaacttagtacgaataccttcatctactgagttatcgataatttcatcaataagcttaacaagaccaggtacatactgaacactttcccatttaccaaacagaaagcgctcatgcatttcattagcagaagagccaatatacatgccactacgctttttgatgtgttcaatatcgctcagaattttaatttcattcttaatcatcacttatcctcgtttggtttcgggaatattatactccaataatcataaagctaaaggcccgaaggccttttatttaaaacggatagtcgaatctttgaagaataaaccagaacatactgttccttctactttctgcccggtaggtccaatagcacgaaatccagtatgctggaaatcattttcagagcaaccaaaccaattatatccagtgatttcaatattagtaaaaccacttgaagacaaaacttttgttgcattatcagcatcagtacatcctactaaagacactgctaatactaatgctgcgatagaacgattaatatatttcataattttcacttaaatttaatggcttgaagaagactaataattctcaagcgacttctttcatctaactgtaaaagaaagagggtcaccagatttcatagtaatagtacattcaaaatcaaaatcttcggaaacttctttgaagaagtcaaattcttcatcataaattagaacattactctgacaactatgaagaatttttccatcatttccagatgctgtactaatcattgtaacattatgacctttcatatcttcaacgataaattcactagtcaatattacagcattaatagaactattcctattactagcagaaagtagatatttctgttcttcaccttcacgaatgcaatatttcttaccgattttaaacataattaccctttaagtaagtcgtaaaaaccaccattcacatgcttaggagcagaaggccgacgagtagacaaacgatgacatttagggcaaacatcattttctcgttcagaaatctttttaattttttcatattcatgcccgcaatcttcggattggcatttataatcatacattggcataattattccttaaagtgtgctttcagcatttgatacaaggaccatgcctgttcattattttcaatagtaactttcattactgggaattctgtgaaatcttctatttgttcttgctctttctcttcctgctcttgctcttcaactgcctgatatggattttccacttcatcaaagaacccagcttcgttagtagaaagccagataaagttttcgtcaaggatatcaccgtgtgttgcatatccaactgtgccagtagatgtcacaattttagtaggacgccaaagataatcaacatctaaaattttaaaaggatgcatacctaaacggcgtgcatagattccgttatcagtatggtctttaataaaattttcttgagcttgtttatttttaaattgataccatttattaacttcaaatttaatagccattaataaatttccttccagtaagttgtgccatcttcagtaatttcacgaaatacaccgtaaattggttgtttatcaccgactttctcatacacataaaccgaagtcaagtgagtaaacttgatggtgtgttccttttgaactactaccaaatctggatcgaataatacatcttcaaattcatcattagtgcagttctgaacaattttacgtttcattataatttcctcattaattgaacagtggagcgatacgtttcagaagagtagcagcacctttagcgaattttacatcatgaaaaacagtttcttcttctgtaacaattcgaactttaatattttcacaatcccaatttttgcgaacaatcttcaaaagctgcagtaaatctttacattcagcaatatcgataacacatccacgagaatcttccattatcgcacgataaccataagccataccataatcgttgaaagattgctcgatgataattaagttttccattttattctccaagttgttttctgtatcagtagttgatattgatatagtaccataatcaactactgatgtatatagttttatgaaaaaatttttaaactttatgcatagcgagctttgctatagtgtttaatccagctttcaggaatgactttgtatgttcctaaaaataccgcgttatataacttaacgccatcttctacccattgatcagtaatgtatgcacacatagcgcgagtacggttaacaaccccttcctcaccttcagtaaattcaaactcataaggagcaacgaacttaatggcctgaccgagtttccacttaaagtctacacctacatgcgaagtatcaatcgtttcaattcctttagcgggaacagctttcaaaaacgcaggctcaagaaatttccatcgaacataaccaaactgaggtttagacattccatctttaggaatgatacgcacttttacttcagaatcttcatctttaacaccatgtttaagctgaatgcttacaacttcaaccaattttcctgctgctttagaacgggatttatcagatacacgagcaatttcaccgatattaatattcataattatctctcacttgttaaaaagattttatactccgcgggaccattatactctggtcccaagagtttgtaaacttaatttaattcactaaacgatgaattcaacacgataaattttcattttattatcctcagtagctatggtgttataataccacaactaaccgaggaagtaaacaactttttatcgttttgttggaagagatagaggatcgcattcttcctctgatggagcatcttcaagacccatagcatatcgcaaagcatacttcatcatcaggatgtctttcgcacagtcatgaatagaatcatgcgcaacgaatccatctaaagttccttttggaagaggacacgtggtcatatcacgaacaagcagaagtgcttcaattctggtacgaatatcacgctgattccagaatttacatggttctaacttaaatgtgtcaagctcattctcagatacaccattaaggcgttgaatatcacgaatgagatcgactaaaattggaaaatcaaatgacattccacgacaccagccttgagatttccaaggatcgatattatgtgcattgatgtaatcattaaattttgcaataccatcgatagtgcttacatcttcatctgatggtgcaatattttttcgagcttcaggagattgatttttccaccattcgatagtgcttttagtaaaaagacgatgtcctttttggctttttaaatcaaatttgattttaatgccacgtgaaactaattcatcgaatgtttcaacgacttctggattagggtcaaaagcaattacagccaaatcaataacagctgctttttcaccacttcccattgtttcaaaatctataataaaatcaaacattaaactttcctcgctaaatcgcgaatttgacctacagtatagtcttgaatataaactttattaataggctcatcaataaattttgccatagattcaatatctttttgtatttcttcaagactgtatactatctttaaagctttttcgcgaatagtaatattttcaggaccctgattttcttcaatgacagctttaacatttgtcataagagatttaaactggcaccaacttaattcaatcattaataatcgcctcataaagatagctaatttcgcctaaaacataatcattaattgtaacagttttcacttcgccacaaaagaattctaacgcaattaaatctcgttcaatttcttctaattgaagcatcaacttactagattcaatttttacagtttcacgatttttaccatgagcaatttcataaatttcgcttactttatcttgaagaagataaaactgatctttagttatttccacgaatagcttcctcaaatttaatcatacataaaatacatcataacgaccacgggtaacaccaacataaagaagttgttgagccaattcagcatctgcataatgaatacaaggtgtataaatgaaagcacggtctacagacataccttgcgctttatggaatgttgatgcaggaagtgctttcactttactgaactgtgatttagcatcccaaaaatcactccatggagcttttccacctttgttccaatttttataagtttctgctgttttacctaaaaataggttaaacttatatagttcttcatcagatgaaattattttaatcttttcacgataatattcatcatcgccgtaagtttctactgttaaatcccaatgacgaattaagtattctccaggaacaccacgagctttaacaaacgttgatgtatactctgcttctataatacgaactaattgtccgttattaaaaataatttctgacacaggctttccatcaattttatatgttttaattaatggttcctgcattacaataatttcaccaacaataaaatctttatcagtttcaaaaatctttttacgaataatgctatttaacttatcaacagatttattcgtaaatgccattacgcgattttcaaacaaatcatctaaagatttgacgattgaaaaataatttaccataaaatcgcgtaaagcggtatcaccagtaaatccacgtactccatgcccgtcaacaactttatcataaatccacttaccgttacgaacgtcagtagctacatcaataataggagcattactgcgtttaacttcagtgagttcacactgataaaaatctttgtgtgtaaagaatggactgatataagcagtattttctcctgggtcaacaggtctaatttgcttattatcgcctattccaattatagtacaccacggcgggatagttgaaagcagaattttaaatagctttctatcatacattgacacttcatcgcagattaataccctgcatttagctaaatctggtacttctttttgttcaaaaagaacgttttcttcgtatgttactgggttaattttaagaatactatgaatagtactcgcttctttccatgatagttttgaaagaatctttttagctgcatgagtaggagctgctaaaataataccagtttcacccgtagatattaaagcttcaatgatgaacttagtaagagtagtcttaccggtaccagcaggtccattaatagttacatgatgtttcttttctttaatagccttcataacaatgttaaaggcatttttttgaccttcggtcaaatcatcaaatgtcatcgtaaattccctgcaattggtatactaacaatacgcccagtatctaaaattcgccgatataatctttgtgtgtctacatcaggcttaacatgtttaacttctattttattaaaccaaaacttgcgtggagtctcaactaatcttggaattcccttacctaaagctagttgatactgctctttaagagtggtaaatactttatcagcaatcttccattcaaaaaatacagcaggacgatgttcatcaagcggaactggcgccgtaaatccgtctttgtctcggtaaactatcgcatatacataaaccatattatcctcggataagtttaaaaattgaacaatttagcggatatcctcttttcagtttaagtttatcaataaaagacaagttttgataccgctctacaccttgaataattttatcacacatatcatattgcatttctgcttctgacaactttttcacagttttccaatccgagcctttaagaagaacgttcaatttaacaacttcagcgccttctgctatacgagaaccatcaatacgagctttaagtgctataattcttagcttaatgtcagaggtctgttttgatttagaaagctgagaaatgtgttcaattcggttttcacgttttttctgtatagctttaatttgattataagtctttttgattttagcccatttcttttcatctaaatttagtttatgaacttttttcgcagatgaacgaccaattcgcaaagcaaacaaatcacgtttttcaattaactcctctaaagtataatcagaacgaaatgtattatactttttctttactgcaataacattccctttaatgtatccaacgttattatcaaaacgttctaatgataatttctctccttcaatacgattatcaaaaggttctcccgagtaagcgcaaactttttggtctaaaatgttcttaatgtaattgaagtctaagttaaaatctttagaacgtcttttagcagatgcctgagtatgctctaaacgacgtttaattttacgaatttgattattagacatattatgcagcttcatatttttctcacatcttacggacggttaactacttatactataacatttttactttaacttgtaaacaactttatgtaaaaatgctttaaaactttcgtggtataatgaatctaagtccttccattatagattaaatctttcaaaatcaagagtatagatagtgtatgttgaacactttttgtactcatatctatctgcaattctaaatacacttccagctggtatcattacttcttgttcatctgaaactaattccatattacgataacgatgactatccggaaacttaaagtttggattgtattctttacagcgtagagcttttatagcatactcctggaaattgaataccataggagctttgaattcaaaaataacttgtgtgttatactctaaaccggaagcaaaatgtagagctatatttttatcatatgaagctgatactactttatcaaatgtaataatatcaattccttgatttaataattgtttagtctcaactggaacacctctccaaagaggtttatcgtttggttccaaacgagatttgattatttcatttaaccaagtatggtcatctggtttgttggtaatacaatgaattaaaagttcaatttcagataaattaaacccttcagaaagtaattcttcacgaatagaagcacgcaccgatgcatccattgattttattttaaaatcttttagttgcattactgagtatttcattcaactacctcaatatcataaactttaagtgttccaaatgaatcgtgtaatttttcttttgaaatagaagttattctatactttccaattggaatcatccattcttgttcacgcacaatcatcattaagttatcagtacgctctgaatctagcccatcagtatcttcatacgtgtacttaaactcagtattaggagaagaaagtataatatcgcatatggtcagaataattaaaagctttatcagtttttaagcgaaatattatttcagtgaaatactcaacataagaaaaaccacatgctgtgtgcaaactggtagtaaatgaatctactctgttcgttgaaaacacttctccaacttgtaaatctttaataagttcttttgttgattttgatataccacgatataactgataaggtgatttagttaaatgctttttaatgattttattcaattgccgatgaagagcttcattctttttggcttccatacattgccaaagaactgactgttcaaagtcagtaaatttttcacaaacctttttatacatatcatattgaaaatcaacgctttcagcttttatagataactgttcaacatctgcaagattaataatcatgatagcctccgtatacttcagaagctatcatatcatcgttagaaaggaaagtaaacaactttttgaattattttgcccagggagcccagggcggagggtcaagatggtatgaagctagttcttctagaagagcatctggggcttcaattccataattctgtaatactatacggtactctttcttataatcactagaatcattctggatattcgtagaatgattatcttctaacatctcaaataaatccatattaattcctagcgataaaaaccaaaatgacgattagcttcagcaatctttctttcttcttcggacattctccagcgtagtccaacatcaaaatgagcccagaccattttaacaaatgcgtgtatgtctttaatatcttcaataatgaatgttttacttttcgaaggttgactcactaatttaaccttatcatcttcaaacaagtcaaaaagaccatattcatgagctcttttatagcctttaatagttaaagcttcagaagaagaaaacggtgaatcagtattttgcaaaatatcttcagtatgctttataattagaataatattttctggatattttctttcttttatatctttaattaaaaaatccggattttctgctaaaggaataattaatgagcattttttatcaagtgtatttactgatttaccttctttagacataaattctattgaatagtgttttgctacttcaatcatgtgatttccttttgcctactaatggaccgtcgggaattttgttttcctggatatatttctcattttcttccatcattttactgccaattttaagaagcaaatccagtgcttcatttgcttttgctttagcctcttctaacgtcatatctttgttcacgatttatccccatagatgtctctcatcaatttaagcgctgagcgttctaatttcttttctttctcagcactaatcattgatttcatccattcttccgattcgttctgcatttctttatttgcttgttcaacccaaccatcaatgtacattgagtttggtctattgaaccattcaagtattttcttcagaactttcatttgttttgcctaaaacaatagtaggattatcatcaaattcatgaattttgagtaaatttggatttaaactattccatacagaagaaataaagtatgataaagcatcttcactcacaattataaacttatttcctttatctattttccaactatatactgaatcatatgaatagaaagataaaggtttatcattatatttttctgcgctaacattaatgtattctgatttaataaatgcttcaattgctctaaatggaatattttgtacagtttcaataataccaatctttttaagttttatttcagcatcttctggaactggcattgaaacgaaattttttacgagatacattgggtcacaataacccttatcaatcattacagctacagtaattggaacatctttagcaaatgacatactattactgctaatatacatttcaaacaaaatcgcttccataattttcctcaatcacaagatgtagatgaacaactagaatcacaagaacttccacatgaatcacctgcccatacatgaacaggaacattagtatcatatgaatcagaactagactgtgtattagatgatgcagtaggtactgaccagcgccaaggatttttataatattcttgggcttcttcataagtcatagtgactgcttctactgttccatctcccatataaacatactcaactacagttaaaggaaggtagtcatttgaaataggaactacaccttccccaggagtcgtagagaaaaaatccgtaaagaaacttttaaaccaattaaagataaacattacaaaaagcctctcttgaattcgacttgcttctcgccataatcatatcgaatttctgcattaaattcgacagaaccatctgcgtacatcataaatgaatgcacaacaacttctgtagaccatggttgtagttcatatttcttcattacatgccgtgaaatgataatatctaaatcttcatttggtttaatccaacgatttaacatagtgctctcctctataagataattctattatactatactcattttgatatgtaaactgcaaaaacgaaaaaatgaaccccgaaggattccttaaattttaaccaccaatacctggagttggcgtaacagtccaaagaccttcatttgcagtaatccaatcagcacgctgattttcttcatatactgttgaatatgctgctttttctgaatgaaatgtctgataatgagccccagaaattttgtgaacatcagaataaagagggaaagctacagaaatttctttaccctgaattgtaccaccgtcaactgcttggtcaaatgttttaatattaacataaccgcgagtactagccatgtaattctccttttatttaaattacatgactatttataataaattctcgcggaacgttaaaatacccaattttagttaatataacaacatcaccattaataattaccggagaataatcttctggagcattaaatttccaatgggctctaatattatatccatcagaaccaaatgctcgactagccggtctcccggctttttgccatgcataaaaatcaaatttcattttgaatgctctataattaattttaaagcttcttcactgacaaaaatttcgtcaggaccttctataatttcaaccatacgaagttgattagttaagagctcacacacgagctctttgttataatctttaaatagctggtcaatacgtttcttatgggctttcttaagctgacgtttatttaaacgagccattaatagcctcggtcttgacgagcgaagttttcggcatttttcagataataaagtttaaagatttcttcagctgacattccaagagcaatgaatttattcataaaaaagtgaaactggtcaatcagttcaaatttaatttcaagctgatcttcaggagataaatcttgaattttcttggattgcatttcagaataacgtttcttccaaggtttccatacagcagaagcttctttttcaccattactcataccaccaagagaagtatatagctcgcgagtttcgtctgcgatataatcgtcttggtttcgcagccaagcaagaacttctcctgcagtttcaagtgaatcaggatgacgatttgtttctggtttatcattagccaaacgaatctgtaaatgccgctgcatatcaagcataacctgcagtgggtcaatattgtgcataatattctcagcatatgcacgagttgctttatcaacaccttcgatcaaatgagcgcattcattaaagtgagccattatttttcctttcaattcattaataagttaaataattatatcatttgaatatgtaagcaattaattaaaaatatatacttcatcagttccattcttttctttggaatgatatatgttaaagacgtattttttattaagatgcttaacattatattttttagaccattctttaagaagagtgttttcctttccgtgatgctctaaaacattcgacagtccaaattttattcctctgtcatttaaagaatctaaaagatttaaaaggtctttttcttcttcttctgaccaaaatttattataatcagcaactgttataagatacggagggtccacatatacaaaatcgccgtctagaattttgacatctttaaaatgcaatgaactaaagattattttatcacaattttgtttaaagtgattaaagcgtttttcactatttttgtttatagttctttttccaaacggagtagtaaaatttcctttatcgtttatacgaatcatattactaaacccgtgaaaatgaagaacataaagtaaaagaggatctctagttttattataatcttcacgtaatttcaaaaactcttcttttgatgtttttgatagtttgtattgctttattacttttaaaacgtcatcccatgatacattaataagacgcttatacatttcaataattggttcttgaatatcattggccaatacaggaccattgacgttcaaagacactgataaacctccacaaaataaatccacgaatctgtcatatttcggaaagtgaggcttaagttcaggtaataatgattgtttattacccgtatacgcgatagctcctagcattatattctctcatttattgcagcaaaaatgaattatacaattcttcatcatatgtatttgataataatactaacacgttttgtgatttagcatattcattaaaccttgcttggatggttggattatcagtaaatgattctctttttgtccatttattacgtggataatatccgcatggcaaaaaatctaatatcatcaatgacacagggttttcagtttttgtgtattcttttaatttctctttatcttctaaatatattccaaccgaatcaatagctgtacctccaccaacttggtgtttaatttcaattatatgctttttaccgttgcgagaaataacaatatcaaatcttctagtacgctttttagttataaaattagagcaaaacaaattatttgatttttcagtatcatcaattaaaaccattttttcttgataactaactgaacaatcagtgaaatattcttttactttattaagtatgaaattttcaactacggcagatattttatatgaatctccgtttaaagccatttcatgcacaattttattaatcattatatcatcctcagcaatttattttataataccacaacaagctgagaaagtaaacaaatttatgataaatattaatttaaaggaggacatatggtacaaaaattaatggcacttgttaatgccatcaaaggtaataaaaagcgtatagcttttactatttctgctatggtaggaattttactctggaactttattttatcacctgttgcaattgcacatggtattaatattccaatagttactcttgatacattcgtagatttagcatttgctttagttgggttaatttaaatcttagcatatttagataaccgcattttagccatcaacccctgggcaatattatttttcatatattccataatttgttcatgggatgcaccttcctttctaatcatatcattaacatcttttgatttccagggagatttatcccaaaacataaccctttctcctgcatcaactaatttagtcattcgtttgatagtgtcagggtgacgaggttcattatctaagacccacactcgtctatctttaaatggaacaatttctaggtctaattgaccacccgtaatagctataccattttcaataaaaagtgaatctataggtccttctagaacatatacatcaccatctttaactcgttcgactccatagatttttgttgcctcaggataagctttgatggtgatatatttttgaggagcatctttctttaatgcacgtccttgaaaagactcagcttttccactagcattataaattggaataacaagacgaggctcaggtatttcctttttatatgttcccggtgctatgctattaaccaatttaggccattcggttgtaaaccaaagatatttccatttatcctttggaatacaacgagcttttacatattttataattggattgtcttccgccagtttatctaatctaacgcatgacggaagagatttaattattttcttttcaggttgtttaggaagttctttaggtttttctactggacgacttttacctttttcttttcttatttcaaagatatactcacgatataaatcaggttcaaactcctttaaatatattccgattggtgcatgatagttacagttataacaatgaatgtttccttcattattatcaccataataccatccacgggctttattttggtcggtttttgaatctccacacactgggcatctaaaccgcaatttaaaagttgaactattatttacttgtgtgaatttaggtaaatgagctaatgcacgatacgcaaactcattatcaatccaaggtattgatgacatttttactcttctttttctttagattcctcttttttctttttaggaatctgttcaggacctttatttactacagcgcctgacgttgttccagtagagatattttcaggattaccacctgaatctccagcgaccatatcttctttgataaattctttatatgttttcatattaacctctattcataaaagcattaaaaatttggtcatcaatagatggtgcagtaatattttctgtatcatttagcaaatcattaatttcatcagatagcataacacatgtacctttatttcctgtaattgttactgcacaattacgaacgttttctttattaaattttaggttaatattttcgtaatgaaaatcctttaatgctgaatatatttttaaaataaaattatcttttactacaataaacccaacctcactattaaaacgtggttcatggaaactgtaataaaccttttcatctataaaatcgtatgaaattttttccatttttaaatatgaaaattcagaactatgcatactaacctctaattattcacctaccacttcagcgatgattatttttattattaaagtttttatcgcaatacagaacataattatactgcattacaccaccagacttaagctgtttttgcacttcagctttcatttcaggacgatcacgctcaacgatattcataatatctgcttcaatttgggtttcaacttcagtctgatccgcagtcatagaccattcacacaaatctttatcatagcctgccatagcaggctgagcagcacaagaagctaaagcaaaaattgtagcaaagataaattttttcatgattaatctcctcagtagtttatgtttatatagtatctcaatttccaataaaagtaaacagttattttaaaacttttgcgtaatcacatgttacaaactgtttctctagcttaacgatcttacgaaagtatcttttgcattggcgaatctgccgcttcgtagggcgaacagcaaacttaataaattccactcgaccaaatggaggactttcttctgctggaatatctaacaccaattcccacgtatctgcaataagtgctttgaattgcgtatttttcctgacgttatacggagtaggtttaaataaaacaatatgcatattatcctcggcaatccacttcacacactttcttatcatcaatgaaagctttaactaatgctttattaacttcagcatattgagtagtagcccattgaacgtcatctttcatcattgtggtttctttagtaaacatgctttcattcttaaaccaccccataaaaactacctttaccaattccataacaatctcctcatttaaccaacaagactactataccataatcttgtcagcttgtaaactaaaattttaattcattcgccaaagcatctaactgagctcgagtggattcatttctttgatagcgattctgctcagcctgaatctgttgtgaacctgctacttcgttcacttcagttggagtagaatcttgttcaatttctacccatttctgatttcctttttgaacacccatcaaaaacttattccatttgtttttatcaccatatcgtgatttgatttgcttaatgagttgttgttcagcagctgctagctcctcggtttcaatgactgcaagcataaaatcggctgttgctggaagaccggcagattctgcaatatcgctcatgttaacatcggaagagtcccaagcttgtttaccaacctgtgctgcagtccaaagaacagtttcggtttcaacagccagagcacgcaattcctctgcaatagctttaacagttgtgtaactattttctgaataaactctaatgcggcaagatttacaaatacctagatagtcgacaataatgattgttggaacaaaattctttttgagcttcaattcatttaaaagcgatcgaaatgtattagcatctgctccaccggtaggatactgtttaacgattaaacgaccgagagtagatttctcacgccatttttccatttttcctttatactcagcgtaagaaatatgcccatcatcaatgtcatcaagagaaacatcaagcatattagcatcaatacgtttagcacagacttcttctgccatttccattgaaatgtaaagaacattatgtccgagctgtaaataatctgctgccaatgaacacaatcctaatgacttaccgacgttaacgccagccattaaaacgttcagtgttccagtctcagctccgcctttagtaattttgtttagaattctgagtttaaatggaaccttacgagctttattcatataagatagccaacgtgcttcgtagtcatccatccaatcatgaccaacgtagctatcaaatgaaattgataatgcttggcgcatgatgtcaggaatagcaccaacatccggcattttcttatttcgtttttccggaggaagctcagcattagtttgaatttcgattattttagacgtagcattaaacatcgccctttgctgaacatatttttctgtttcttttactaaccagctgtggtcttccggagaatcagctagttttgaaataagtgtttttacaccagaatattctgtttcagtaaatgaactattttctaatgcaacatttaacgcattaatagatggaacgctatggtactcattaacatgagatttaattaatttgaatgtatttttagctggaccactttcaaaatattctgaatccatatatggccaaacttttgaaaaataagcttgatcaaatatgagatgagaaagaataatttctaccacacttactccttaaaagaatttaaattttttctttgaccttttattaaatgcatcttgtaattgcattgtaatacatttttctacatgaggagctaactcagcttttctttcttggtcaagaacagcaaagtccattacaacctttccatcaacccaatccagttttgttacatacactatatgtgtagaaccatcttctagtttaatgacaatctcctggataacattttccatagcggatttaattatcttaagagactcattaaaaagacgttcttttctttcttcttccccctccgaagagggggattcatcgataatttctagatctaaatctaaatcatctttattcattaaattcttccatatcacttaactgttcgaggtcagtttctaaatcagctgctgatttacttttactttctggagatttaaatttttcaacctttgagttaatcaattcatcaacttcagcttcaacaatttcattactatcaatagcacctaactgataagcacgtttaatagcatctcggaatggttgatgcttaaataaaggaccccagaatgtagtgcagttagtatcttttgcacgccaagatttttcttcgcgaatcatctcgccggtttcttcgtcaagaaattcacgagcataccaaccattcttaggttttaccacgaatcctaattctagagccatatctaacaatccagaataaggatcgataccaccgtcaaatttaacatcaataaaaaatttacttttttctttaacggtacgagatttttctacatttagaacaaattgatacccctgaagatcagaaccatctttaatctgacgtttaccgataatgaatacagtatcagccgaatacattacgcctgtaccacctgtcatcacggttttactaaacatttcaattgtttcaattgtatggttaaccgcaacacacggaatatttttaatgctaaaataaggagtaacaatacggaataatgacttcagtgatttagcacgagtcatatctgccacagatttttcattcaaggcatcttccgtttctttcttagaagccatattaccgattgagtcgatgaatacaataaccttttcaccacgctcaatagcttcaagctggttcaccatatcaattttcagctgttcaactgactgaattggcgtatgaattactcgttccgggtcaactcccatggatcgcaaataagctggagtaataccaaattcgctatcatagaatagacaaaccgcgtcaggatatttgttcaaatatgccgcaaccatagtcaaagacatatttgatttaaagtgtttagaaggccctgcgaaaatagttaaaccagactgcataccaccatcaatcgcaccagaaatagcaatattaagcattgggatttttgtacggattacatccttttcattaaagaatttagatgtagtcagctcagcagtcattttagaagtggaagctttaatcaaacgggattttaaatctgcaatagacattcattttttccataggcatcattatattttcctcactggttaaagatagagtaattataacacaataaatttaggcattaatcaactgctattggatgaatagcattaaacttatgaaatgcttctgatttttctttacgcgaaacacacatgcgaagaacctttaatgactcgtcttcttcacccaacgattttcgtttttcaatattagaagttttccaacgagcttgctctggaaactctctattgatttgctcaagcgctctattatgtttagaattactgcgaattgaactgcacccgccaggagcttgtgcttttccagatacaactagatatttgaacaaggccaaatgcggataaccttgattaattaaattgagaaatgcatacatatcttcgcataaatcaatttttccatacccaatttgttctgtagtaagttttccgaggtcataccatgtattcgtgaatccatatgaattttcacgataattaccccaagatgaagtaattttaaaaataggtagacgagcatggccatgataatacccacaatccatggcatcctcaacatattgaatcaattcatagaactgttcacgagtcaattgattgactttatctacgcaacgacgatcatctctttttcgcattgaactcatacgaatagtagtatcatcgtcaatcatccagattcgttgacctgcatacatatcagtaattgctttacgagtaccggcaattccgtttacatcatcaggaatagttataattttagctctagacccataggcgtcataataagctttttcttcatgttcacgtactacgatatgaggttcataatcagtcggaaacatatcaagggcagaaactgcccctacatgttgatagctcggaattacgaattgaatcatttccactcaccgttataatcttttttcacaatatgagtttcgccagtattccaccaatgatcaaccaagtaaaaatgacgagaatatacatgaagacttccaacattccatataatagaacctgctttatactgacgagttgaatcgcctgcattcaaatcagatactaatttatctagtacgtatttttgccatgcataatcattacggaatccgaagaccacgtcatttgagcgcatgcttactactgcattgactttcttatcacgaatcaggtattgtactgtattcgtgcacatgaaatctgacatgccgtctttgttgtagtcaaactgcatagatggacgagtataaatcatgataccacgtcgagaatcaggattttgaccaagttcagctaaacacatgtcatattgagcatagttatcttctgaccagatagcccaaccataattcgagttaatttcacctttagaagatgctacttgttgccaaatcttcggtgtttcacccggaatatctttaacgaacaagctcttagatttataccattcaagttcacgctgaatgtattcatcattaagagcgccaaaaataaacggttcatctgctacaaatgatgcgccaataatttcaatagttttaacaccagttttatcaactacgaaatctttttcttttaatgcaagccccaaatgaagacggatttcttcaactgtcatagagtcactaatcatttaaacctcaattgatgcattcatatttaaattgtaacagtaataaaccccaccctatgataagagttggaatcatagcaggaactgttacgctatagtatatacttattataaccatcaagattaaaagcaacactgctataattttgcttttcattctttctctctgatgataattacctgatttggctgcgcagactttttagtttcaccagcaattgaccaaataaatgtaataaaccaaccaataattgaccagttaaacagtaaagatgtgaaaaagattcctactgtcgattttgacccacgcatcaaggcgataaaccatggaagcatgtatataataatagccaacacacctgaaactaaaaccataaaaattgaacctgctactaaagtttccatgttttcctcacttagtcaaattttttacacatgaattataagaattcactacatactccatcggagcatttttaccggtacgccactggtaattattagcccaatttgcccaaagcacggcgcagtagttttcaattttttcttcgcgcgtaattacatccgaattacgatatgcttgagcagattcatctggacgaatagcctcgtcaaaattcgcctgcatttgttctactgtctgttttggagcttctttataacacttgacattaggattataaaatttgcttgaacagtttacaatttttcctacatcagactgatttactacctgtccttgagctacacaaccagtaagacctaatgcaataaccaaaatagcgattttcataataatttcctcttaaaacttaacaaataactttaaagcatcttcagttttaattccttttcttacacccataacagaaattggctgtgactgaaattttcctttaccattataaatttctaatccagtcaccattccattttgttctataataccgtaagtgttaccttcattttcaaattctttaactttaaaaagtttattcgctttttctgcgttaacaacttttaaattttgaataaaattagtttgaatatttttcattttgtgttcctccgtagttgatagttgtatagtaccacagaggaacagtcttgtaaacagttttgtgaaaaaatttttaatgaattcaaagggtccagaatcatctgtttttcataagtatagatttatattacttgtatgaaaaggggacccggaggtccctagatttattctatcagccaaacaggaagtctaacgaagctttttcctcatagtccatacctgccgattcacacatacccgcaagcggtttaacaaacgatttttggaacaaagttgagtagtcaatccaagatagtacatcagaacgaatttcttttggaagttctgtacccgatggccaagcaatgcacttatcaccaaacggatttccttcacgtaatggaagaaccattactttatttccatccaaaattggagctacacccagaccactaacagctcgacgataagttagcacaccacgaatatggaacggacatttaaatcctggccaacctttatcatcatatttcgctatatcgttcgcagtttttacttcagcaataactttatagtcaagttgacgatattctttctcgaagttcttgtaatattcttggacagactcttcgccttcctgaagaatacgacgaatactttcttcgagtgcttcttgcactgcttttggtgttgaactctgctgagtttccatacccatgatttttagatgcggttcagcaaatcgcttatcttccatatcataaacgttcagagcataacgttttttcgctttccaaaatccaccaacaccctttgaaccaagcggagggcaagaaatagcttcacggtccatatgcatcagatgctcgcggttattcatataatcacataactcacgatatgcaacatcaatcataggttccatctttttcttaccaaactgattcatgaattcaaccaaatcgttctgctctttgaatcggtcaagaccaactttttcaataactttatctacacaaacatataccgaatcagtatcacctgctgcgatgaaatcttcatcattagttccgcatactttattcagatattcattaattttacgagcaatccactgaataccaacttgaccaaaaattgtgatagcagtagcatttcgtaaatcatagtaacggaaatgaatattaccaagagcaccataaagactgttaataagaattttacggttcagctgatttgtattagcaagtgtagctgctttttcacattcttcaatcagactattaagaacagattcagtataattcgatagttcatttaagaaatcatcagtgaacttaacatatcgttcaacttctggtttagttgaacaagaccctgcgcctttcataataatctttttaatagcttcggcattcatttcttcagcgaacattttctttttccaatctttacgctggaaaaatactttagcgatttcctttggaatgataccttcttgatgcttatcatacatccatccattcggagaacaagaatattcatcacttggtttaggagctgttcctgcgatatattcatgaattggatgaactttaaactgaccacgaatagtttcaggactaatgttaacctggcgaataatgctcggatacagagacgtcaagtcaaaactcataatgtatcgacgagcaattggtttaggttcaaatacaaatgcacccggaaaactctgtttaacgtgcgaaccttgttgaggaataaccttgtgttcacctttcaatgagttaaaaataatagcatcccaagttttaataggactcattacaccagaaaaaggcattttagcataataagacatacttaaaactagatcgataaacccacgaattttatcaattgcttgaactgattctacgtcaatgatgttataactaatgtatcgttgatgattagtctcacgaagtttattaataggaccgtcgtatggtaatttaccttttttggtttcatgttgagcaactgattccaaagagaatgacggcaaattagtaaaagcgaatttcttgtacaaatctaaataatcaagaatagatacgccatcaatagaataaatttctttgctaccgtacatattttgaattagtttagattttacccgaccgattggagagaaacgtttcatactgcgttcacccagaatcattttaacgcgattcatgatatacggaacgtcaaacccctcaatattccaaccagtaaaaatagcaggtcgtttctgttcccagagattaatatattccatgagcatatcacgctcattatcaaatggcatataaattactcggtcaagaatttcttgaggaacttcatcaccaccttcacagtcaagcttagcagctaactttgcatcccattttgatactgaaccgtacattgaattcaaaaggtcgaaaacataaaaacggtcgtcaattgaatcataatgagtgatagcatcaatttcatattctgctttcattgggtcaggaaatttatcaccagtaacctcaatgtcacagttagctacacgaacaaattttcggtcataaacaatttctgaaccatacgtatcactgatataagcgagtttaaaatcgttcataccgagagcttcgagaccgatgtcttccattcgcttcatccaatctcgagcatctttcattgatggaaatttttgaggagcacagtttttaccatagatgtctttgtattttgactcttccttacaatgcctaaacatagtcggaagatattctacttcacgagtacgttcctttccgttttcatcaatataacgttcaataatattatttccgactgtttcgatagagatataaaattctttcatagatattccttagtttatagcccgagttattaggctcttgatatattatactccaaataaggggccgaagccccttgcttaattaccaatcgtatatttaggaacgagtttccattcatgtttttgtttaaaagaaataactcggaagttattagttaaatctttcataaaagttctttgaccaggaacgatttcaattagtccccaatcttctaatagccatgcaatcgaatcacgacgaacttcatcttcttctgtcatttcaacttggcgaccatccatacgaagcatttctttaaaatgaacgatatagtatagtccttttttctgaagaatatgacaggactgatacagaactttatctttattattagcaattcccatacgagtcaaagtttcttttactttcagaaaatcttcaggttttttaagagtaatttcaatcattttaccattccaatgctagttttttgagttgtttctgttcttttacgttcttagtcacttctttcaaaaaatcatccgtgactaaaccttttagttcttttaatactaaaggaagttttccgtttttagtaagaattgatttatagttaattgcatcatttgtattaacttgataccgtttagcaagtaacttaataatcaatacttcggtggaatcttcaaccagttttgcccatttaccatatcttttaccacgaggaactgcagccatcagataattaaaatgggcttcatcacttaagcctgatccaattaaattcatagcatatacagctggcatgcactctggaaattgtgataatgcattttcgaccatgaattttgaataatctttttgagcaatagagcatttagttttattattaatagctccaattatttcaaaaaattcattttcggctttttctttaaaagaatcagcagcggattggacagctgtccaatcttttgaataccaagcaacttgatgctcgtttaattgaatatcatcttcaaataagctcatatcacttccactgcatttcgcatgctaattgaatgaaaagataagctaaatgtaattcagtgttagctgcaataccatgatactgattattttcaccaacaatttcgtacatacgaataatgctctgtggagttacacgtgaatagatttcttcggcaagtttacccacgaaccacgaataatcagccgcgtattttggtgctaaagctctgagttgtttaacatctttatttttgagagactcaagaacatcatcaatagcaccacgatcgttagtaaccagtgataaaataccagcatccaaaacacctttagatgaataactatcgagctcgccaatagttttacgaaaatcaggaaaattctttttaaccaaagctgctacaactttcatatcagctatagcaattccttcgtgcttgcagatttcagtcaatcgacgaatcatctgcttcatcatttcaattttatcttcatcagttggttgaccgaatgtaataactcggcagcgtgactgaagcggtttaataataccatcaatattgttagcagtaataataatactacagtttgaactataagcttccataaaggaacgaagatgtcgctgagactctgctaaccctgagcggtcaaattcatcaataacgattactttttgacgaccatcaaatgaagcggcgctggcaaaattagtcaaaggaccacgaacgaaatcaattttacaatctgatccattcacaaacatcatatcagcatttacatcatgacacaatgcttttgctacagttgttttacctgttcctggagaaggagaatgaagaataatatgtggaatcttacctttacttgtaatagatttaaaggtttctttatcaaaggcgggaagaatacattcatcgatagtagatggacgatatttctgttcaagaatgtgttctttttcatttacggtaatcataatttcctcattcaaattttagtgtaaattataaagggccgaagccctctattaaaaatcgtgggtagaatcagcttcaagagctactacataattcgcgtgttcaccttcaaatttagcagcaccttgtttaccttttgcccagagcagaagtttataatttcctggttgcattttcatatttgccatattgataatgaaattaaatgtattttcaccatcataatcaccaagagtcaaagaatatttaacacgggtcagagcagaatcttctactttattaaaaccgttaattacgattttaccttcttttaccgtgatagcaattgtatcaatttgcagaccacgagatacacgcaacagttgttgaaggtcttcagctttaatttcagtaacaacagatgctaccgggaatggaattggtttattaggagcaactactgtactcggatcggctgctggccaaaaaattgttgaacgagcatcagcaattttaatatttccatcttctgactgggaaatttctgcatcatcattaactagagacagaataccgagaaaaccgttcaaatcgtaaatcgctacatcaaaatcaataacgtcagaaatatttgcttccgcataagttgtaccattaactgcgcgagtcataataaattgaccggatttaagcataataccagagttaatagtagcgaaatttttaagcagagcagtagtatctttagacagtttcatgtaatttccttcaattcaaatgagatttaattttataactaatttaataaagcaattaacgattaaaatcagccgcaattgtttccgcaacaatttgagcagcaacaattagacgttcatctgcattaccgcaataatcatcttcaaggcgttcaccacatgaagtcataataaatttagcaccggcgtttagggattctgtagtatgtttgcgcattagttcaatccatttattacttacttcacgatcgatagcttcataatacgcatgacgagcaggtgcagatttaattttgttctgaataacttccattgcgttatcagaaagagacaaaacccatgctcgacgaattttattttggttttgtggatttgattcagaacgcacgtgttttggctgaatatcttttacatcaacagtataattcacagtaattttagtcataatacacctttagtcataataatcagtaacagtccaagcttcatttctattggacattatttttgtatattctgctttaaatgcattcctaagcatagattcagtaactatatgctcttcattagaaaaattatttctcagaatatatcgttttatttcaggaatagttaatagatgctgtccagttgaatattccatgtttttcctccatagagattatactctaataaattaaagcataatctcttataaattaaaccattacagtaaatcgaccaactttcttcatttgaagatgctgaccatatgcttgcgggtcatggtctctatgcgaaataacaaaaacattagtattttttaaactatccaaaatagttgaaatagcttttacaccttcaacgtcggtcgctgaatcaaaaacttcatcaagaattagtgtgtttattttaacacctgaaactttttcagcaatatcacgccaagtaaataaaagagcaatatcaattcgtgctttttcaccttgactgaatgaagcataactaaaatcttcgcgaccacgggatttaattgtctcattaaattcttcatctaatgtaaacacataatccgcttccattattttaagataatggttaatctgcttattaaataatggaatgtactttttaataatagcacctttaataccagaatctttgagcatatcagtcaaaattcctcggtggtatttttccattactaaattagtttttgtcttaacaattttatcaagttcttcttgaagcagtgctatttcatcagcatggtcaataaactcagaagatgctttttctatagccgctttaacttttttagctttatctactgctgcgatcaaagattgctttttattgcgaatatcatttgccaacgactgctgggttttaatattatctcggtattcatcaacaagaacttttaaattatcacgatgtgttgaaagctgttcaaaagaatgcgtacattcagaaactttatctttaattttagaaacaactttatcaccggaactcaattgtgacaaacaggttggacataatccaccttcgtgatacatattaatgactttattatacgagtcaatttttgatttaattaaaactgcttcttgaccgattttattaaatgcatcagtcgggtcttcgtctaaaacaatattaactaatctttcattagcttcttctatttccgattttagcgttctagcttcttttgccaaatcatcatacatattttgtagacgagtaaggttgtcaccagttaattttttctggcgttcaacgttatcattatatattttaatttgttggataatactatcttttttaacatcaagcacttggttttgtgaatttaattcacgtattagtgctttattaagcttatccatttcagctaatgttcctacctcaagcaggtcttccacaagctttcttcgtgcaggggtcgacaaacccatgaaaggggtataccctgctgtaccaaggacaacaatctgcttgaaactggcatatgacattccgataagctgttcaaattctgcttggaaatctttactgctggcagattcattaagacgtgtaccgttaacggtgatttcgaaaacgtttggtttttgtcctcttttgatatagtactttttctcatcatattccatccacagttcaactaaaagttctttcttatttgtgctgtttattaattgacctttctttacatcacggaatggcttgccaaaaagcccaaatgtgatggcttctaacatagtagacttaccaccgccatttcgtccagtaataagagttttttgaaccttatctaattgaatgtcaactccattttgaccaactgacattatatttttatattttactctattaagtttaaatgatttcattttgtatccaattgttcacaatgaagaaaattctttaactaaagcctgtaatgaagcctctattggatatccattcttaactaacattttcctaaacatcacatgtttaggacgattatatgatatccacaattcatacaatttatctttattatcccaatgatagccttttcgtctagatgctatatgagcttttctaatctccggatttttccaactagcagctactgaatttgatatagctattttatattcaggttgataaagcagcacgaacagccttttggtgtttaattttattttcttcgttattaaaccattccattgaagccattgaaattttttgttttgttttaaaattatttaatctttctttgttatctttcctattttttgctactgaaaaatattttaatgccctttctctagcagcatttctattttgtggatttgaataatactgttgaagcctttttgatattatgtcacttacatcctgtcttataaaactatattcagcagctattaaatcaacttcggctaaagataaatttttatatgtttttcctgacatcattctatttaaagcatttagcatttttccatttttaccttttgctaataagaaatgtgctttgaaatgattaaaatgacttaaattaactaaattccatgtagattttaaatattcaggaaatattgatttaggaagcacgtggtgtgcttccgttttacctggagttttaacagttgaattcatagaaataaaattaatgtaagacttggcgtcttcttcactcaacgctaatttttcaactaattcctttattaaaaattcatcattaatatcaagtttaaaattcttcacaaaagattccttttaatgtatcttttagaccattctatcatatcatcataatctaaaaagtattcatcaaattcagccatgcaaacaacgccttgtgctgtttttgatgtaatataaattattccaacatatctagaatcttcttcggtataatcaatgtttgctatgaattcatcattaatgtcaaatgtcgaaaacttcacagtatgcatccttaatacaagatacagccatatctcgcaatgatttaggtgtgtcattatctaaaatgttgaagttaaaggatacagcccagtcagtgcagaccgtaacctttttaatacaattatcttcaacctctagcggttcaaaccaatattcaataatttctttatgcccaatatcatcttttacttcacattcaaagtgctgactcatcataacatttttaaattcatcaaaagtcattgtgttgcctctacatatagctgatttgcatattgaataagtgcttcacggtcagaatcagtgatgtctggaattgcattaatgtattcttccatcaatgtctgaagcgattgaacttcaacttcttcactgtcatctgactcgacagagttatcaatctttgacacaactcgtaatgaatgcacaactttctctagttcagattcgaacttcgtcagatttttgtctacttcagttactataacacgtactgatagatttgtaaaatctttatagtcaatttttcctttaaatggataatgaattctacgatgccaggtagtattgtttggaataaattccattcgttctgtttctgtatcaaacatccagaacccacgagggtcattctcgtcacctgcagttagtgtccatggtgtcccaatatatctgacgtttgcagcctcagaaatagtatggaagtgaccagaccacacttctttataagtcttaaggaaatcaggttcaagaccatgagatttcattcctttataaaaataaaatccattcagttcccagtgaccgacgcaaaaagaagcagatgaagttttgatgtgttcaagaatttcaccagtattttcttcgcacatccaaggaatcaaatcaatcaaacatccgtcaaaatctactgtagtaggcttatcatatactttaacattaggatatttagccaaaagctcagtagaggcatttggatgcattacatttttatagtggagatcgtgatttcctacaatagtatgtaatgtaattccagcatcatcaagcgtttgaactatttcacgggcgaactccatagttttgtgtgtgattgcttttcgcacatcaaaaatatcaccgtattgaatccatgtagtaattccatttttcttagaatattctattgcttgtttaattccatcaatttgaataccgcgaatccactcatcatcagctttaacgcctaaatgccaatcacctaaatttaaaattttcatatatcaagaaccgtcattgaaatgcaaaataaaattattgaaataaatccatctggagtactaaagaacccaatccaacatgctctagtgaatagataaaatgcaagaaaaagtatcacatatccaagaaatatcattatatcaaactccgtataaagctaaagggccgaagccctttattttgtaataatgtcaaactgttctttaaagcagaagcttgaatcttgatgctgatacaaaaattcatatgctttttcacgttcgcggtcataaagagttcggtcagatgacagttctttaatacgctcgaatgttgattccatgtcattttcatcaaaccaaatgataccgctatcatgcgaggtcaaaggagtattatcaacacggaattttaaattatcacccgttgatttccagaaaacaggaattgttccacatgcaccaagctcgagatgagtatattctaaagaacgttgtagatattttttgtccaacttactcaactgataaccaaatccggatttactcatgcgttcaagcatttcgctatttacataacggtcaagaatttgcgttggtaaattaggagcaattttaatttggtctacttgatgaagacgataatactcgtatggaattcctttttctttaataggaatgaacgctggagaacgttccagaccttccataatagtacttagtcctgcaggtttaagatgtttttcgtgaaaatcaaacatctgataaaaacctttccatgtagtcgtacgaccaatccaacggttgatattcatgttaatttcagaaacatctttccagtaggttgaccgaaccttcgcaatatccataggaggctgaaagttatatactgtcggcgcttcttcaatatcatcaaacagagaaacagtttctggataccattctttcatcagaactttattaaaatcaccattatcagaatggctaaaaataacatcagctcgacgaacagtttcttctaatcccaaatttcgacgcaaagaaagagaagaatggtcatgttgataaactacaacacgaaccgaaggtttaatgttatcaataatttttttatagttattaatagtgtcttcttcaactgaagtagcaggaactgaattgataattagaatatcacaatcatttaccagcttaagtgttttatcgtattcttttgccaataaaaccggaattgaaaatgatttataatcatgcgcacagttacgagtaaatgatttatctttagcataaaccaaagttacttcatgaccatttttaataaaccaatcacgttgctcaagagaaaatttagttacaccgcaaccttcaagacctcgagccataaaaatacatactttcatttaatatcctcattgttttggtttattttaccaaaaatttataaagcaatataggagccgaagctcctatccgcataatacgccatacaaaggctcattagagcttctaaattttatgcgcttatatgttatagttccttctgctttagctttatcatgagactctttaaagcgtctcatcatttcctctttagaggaacgaattttattataatctatttcagaagtctggatgttcatctttcataactgccaccattttttaacttgataagaatcaacccacactttcatattagggtctgctcttacaataggaggattaacttctttaattgaactatcacggtattctttttcagaaattttcacacaaagatgaccattcaaagattcagtaaatcctgcattaattttaagacgcttgaattttacgcgtgtaagcatcaatcatatcctcaatctgcgatctagtagtcttccaaagaatactaatgagttcatctttatatggctgttttagaatatcccgacttttcttgatagcatattcgtattgagcaaaattattattttcagctgcaatctgagcgtgcttataaagacgattcagttcgcgtttgtttttagacaataacttatttgcttttctttctgcttcaagacggttcttttcttcaatagaagaaataagcttttccacttcatcattaatttcgggtttatcagtcatattatttctctaatataaaataaaaatcatcatctgttaaatgataccgatagtttaattctacaccattagatttaaaagcggtatcatacggattttctggatcaatatcaatgtcaagagataaaacttccctgagatacattttaagtaaatagggaatagcttcaacttcaggtatttcttccaagaatccggagaggttaatcgttagcctcatataaaaaatccaaactaggagaatcgtctacaacacttttcttttcagcccccggtgttctataggttgattcttcgtaatgcgtcattttatcatagatgtcttgaataaaagtttcatctactaacgcaaccatatcgtcgtcacgactgtcatagacattgtgaacgaagtaactatatttctttgcaacttccttacgttcttttttaatacgttggacgaatgcattaaaacaagcttgagttatatacgcatgtgggtttttatatttcgtttcatcaaaattgtgaagccccttaatagaagcttctataccatctgcaatcatttcttgtttccaagactgggtgtatcctgaaaagttgaaacgtttagataagccttctgcaataagcataatggctaatccgatagtatcattttgacgaactactttatttgggtctttattatttgctaattctgttttccaatcaataatagcttgtaaaagctctttattgtttacgtaattatatttaggcttagtttctgacattttcacctcttagctcaattcatagatctattatatcataatatttgaagatctatcttaaagcatagaggatgaatcaatttcaagaattcatcagcttagccgctccaagagctgcatctagtgaatcaaattggtcaacatattcaattaattcaccgtaattagcgtataaccaccattggctaaattcatactcaaggatgaatccgtttccttcaatttgaattaaaccaatgccatttgtatttacttcatatccagcaagacgcaaatcgttaataagagcttcgttcataattataccttagtaattttcaggtctgcaaattttttcttgcgttgatttttcatgcgacgaatagttttatcggaaatttcatgcttttgataagctttagattctacaccaaaagctttaacatcaaattctgacaagatatattgaaccaacaattcacggacagtattgcgtccaatcttctgatcattctgtttcatcgtctgatgaagctctttttcccatttatccaaaatttgaggagttacaatatcgcctttttctaacaaagaaactactttatcatatgcgtaagaattgatggcgtttttaatttgaatagtcatacattatcctcaattacgttaaaattttattatccaaaaagggccgaagcccttagctaaactttttggcacccttccagccttcatacatcattgcggctgatattaatattgctcctgagcaacttgaatatttgtgattccaaaaccagtttagaaaaacttcgtcatcaataccttgggctatcatattttcaaagaactgacgacgagcttcggcaattcgctgcgataatttagattcaggattcatttaaatttcccaatttccattttcatcaataaatttaatccagtcatttactgaccacttggtcgtatcaccctttggagtaacatttaaagtgtatagcccttgcttaaaaagcatgcgtttgatattcatattttcctcagctgtaacgataacactcgtttgatttacgtttagcaactcgttgagaagtattataatcaaaatcatcgtcaatgtaaactgattttttcaactttcttacttcaccgcgtaattgacgatttagctcatctttaacttctgaatcaatacctttcattctacgccatttatctgagcgaaaaatgttttcaaccatatctttatgacttacaccatcaggagctttacgctttccaaaatagtcataatcacgcacttttaagtctttacgacgatacgttttacccatggagtttaatttccttagcaactgaactaaatacagcacgatcacaaatcatacgtttgttccatttaatcacagtataatgaacatctaaatcatcgactgctgtaacgataacgatatgtccgttaacacgataatactggtcaattttaatctctttatcaaccatatcaattcctcaaaggtaattcatatgttaataataccatagtttgaacttgttgtaaacaactttgtgaaaaatattttagggaatgataagaaaggaacgatagcttagaatggtaatatacagaatgtgagaaagaaaggcccagagggcccgtcttaatcttctatgatatctctatcatatccaagtgaaatgagagtttctttgaagtgtttaatgttcttttgtctagaatcattaatgaaaatgactggataacgaatgttaagagatgtgaatccagcgcgtttagcaagagatacaatcagtggacgatcatactcaatcttaccattatttgtaagaactttatagaaagtaaaaggagcattgagctcctttagaagttttgtaactgattgacatccaggacaacgacctacttcatctggaattccatagacttcaatcttattttgtttcacaactattccttactaagagcagcattcagcttgttagtaattttatccaggcgctcattgaactcactggaagataagcccttttctggagaaattaaactaatcacgaaaaatatagcaataaaaggaataaggaaaatagctccaactgccataaacagaaagaatgttacagttgtaagaaaatcagctaaacctttacgaaatttatacatattttacccttaattaattaaccaagcattgataagcactaaactatattgggaataaaattctggaccaaaatgaaaaatcatatcatttatagtatccataatgtaattcaatttaatcatgtttccacaccccatcggtatttgaccaaagtcgctgattatctgatcctcgccacagctttttagtcggaagatttttctcatacttcccatcaataataacatcaacatatttaagcatttctagttgtttaatatcttcaaacttatatcctgtccacaaccaaatgcttttattgggataaagattttttactgtttgaacaatgcaatgaatgacatctcgattatccggatagagagggtctcctccagttatagtcaatccttctatataatcattattcaaacattcaattaattgttctagtgtttcaccagtgaatggaataccatttctagcattccatgttgatttattataacacccttcacatttatgcaaacaacctgtaacgaaaagaacgaccctgcaaccagggccattcacaaaatcgcaaggataaaatctatcataattcattgatgcttaaccctatgcatgatttctttatttttgccgagattaaatccacgttcgttcggatttcccaaataaccacacgttcttcttattgtgttcatctttttaggatcagtttctccacaaatagaacaaacaaatccgttttcagtaggagtcatttcatgggtacttccacatgtaaaacatttatctaccggcatgttaacaccaaaataatctaaatgttgtgcagcataatcccatacggcctcaagaccctttaagttatttttcatatcaggaagttcaacataagaaatgtgaccacctgtcgcaatgaaatgatatggcgcttcacgagaaatcttttcaaacggagtaatattttcttctactgaaacatggaaactgttagtgtaccagcctttatcggtaacatcttttacgcttccatatttttctgtatcgagtttacagaagcgataacaaaggttttcagcaggagtagaatataaactaaaagcaaatccggttctttcagtccactgtttaagatgagcattcattttagttaaaatttctcgtccaatatcacgaccgacaagaatattcaattcgtgaataccaatgtatcctaaagacactgaacttctaccgtttttaaataactcaattatgtcgtcatcaggtttaagacgaaccccgaatgcaccttcttggtaaagaataggagcaacagtagctttaactccttttaaggaactaattctacacatcaaagcttcaaaacataaatccattcgttcattgaacaattcaacaaatttctgttcattgaactgtgttccaatataagaatctaacgcgatgcgaggaagattcagtgttacaacaccaagattattacgtccatcaagaatttcattgccagtcgaatctttccatacgcccaagaaactacggcaacccattggagaaacaggaacagatgaaccagtgatagctttattgttcttagctgaaataatatcaggatacatccttttgcttgcacactctaaagcaagctgcttaatatcatagttcggatcgtctttataaagattaacaccttcttcaacgaacataacaagcttagggaaaataggagttatcccatcacggccaagacctttaatgcgatttttcagaattgctttctgaatcattcgttcagtccagtcagttcccgtaccaaatgtaattgttacaaaaggcgtttgtccgtttgaactaaagagagtatttacttcatattcataagcttggaatgcatcgtatacgtctttttctgttttagattgagcataattcaacgcatcagcgatttgccatttttctgcatcctcaatatgttttgcatatgtgcgtttaacataaggagaaagtactttatctacattggcaaaagtcgttccgccgtattggtgagaagcaacctgtgcagtaatttgtgccataattgcagtagcaacgccaattgatttaggagtttcaatctgtgcattaccaagcttaaatccgttttcaagcattccttttaaatctactaaacagcaattagtaaatggaagagcaggggaataatcaatatcatggaaatgaataattccgctttcatgcgctttcataataaaagacgggaccatatttttggcaatgtgtttagacacaataccagccataaggtcccgttgagttggaaaaacacgagaatctttattagcattctcgtttaaaaggtctttattagttttatgaatcaatccttcaatttctttttcaattgtcattttaaactctttctaagctgcttcttgaatgaagctattaactgtgttttggtgtcagattcattatattcaaatcctctttgaagcatctcggccatcatttcctcttttcctaaacgagaaaattcctttgatttatctccaacaaagttagggtgaatattattttgggtgtaatcggattttaagtaagtaagtaaattttctaaccattcaagataatcaaccccttgtccctttaagccagaacgattaaatttgtgcttcatttgaccttctgcggcattgcagagattacaaagcaatccacgcacctttcctgcttttggtccatttaattcatggtcatggtcgaggtgattagcttgaacatcaggatttagttctcgttggcaaattaagcatttaccgttttgtgcattataaaatttttgtttttcttctttgtataatttgccagtcaataacataataaacccttaccttaaatagataagggtatttattattttcaagtattgtaaaacatttgatgcaatcgcttatattgctgaatcattcggtcagaaaaagaaatttgagtttcaagccattcaatgtactctgcggcagcttgcattaaatttccttcatagccatcgttattttcttgtgcagctaatttagctaatgcgtatgaaatacgttcaccttgaaaatcggctttaggcttctgaacaacttgattagttcgctctacaacttcttcaatttcgccattttcgactgattcagtattccacaaacaccagtatgtaattggcttatcgtagatgttaataatctttccatcagaaagttcaatttcaataattccagtatcaggttctatatcatcttcacattcttttgcaagttcacgaactttaaagacagtacctgcactaagttccggccagtaattacatagccctgtatcagcacgattaattctaaaccacttatctactgtaatcatgtcccatctccatatcaattaagtcatttatcgttggttcattatatactgtttcttcatcagtgtaaaccggttcttccggctctggctctacagtttcccatctagccgcccaccaaggttttatagcgtaatccattctcgtactgtctgagttactacacgttctcgaagctcaaccagttcaacggtaggaactgcataataccagtcagaatggtaagaacctgagcgagattcatttacagccatgtacattatgttttggactaaaataaacacactgacgatattggcatttaccatcttgcacccagtcttctatttcgataggtttaagatagtcggaaaaatcgaaatcatagttttccgaaaatgcatcatggtcttcgatgatttcgctcagaactgcatcaacatctaatttattttcaatagtcattttttcaccaattaatttcgcaatttattaagttcttcataatcaatccaggattctaatcctgatggcaaatcagattcaatttcccaaagaagttcttcaattttatgaagacgatctaattcttcagctggaatagtaaccattgatggagttcttgatacactaatatcgtaaatcatatttaccccagtttgaccatacaatcgccgtatttccacttagaaatagacttttcaccgttagaataataaacttcgagtttagcacgattatttttaatttgaataaccttggctgtcatcaaagttccatacccatagtaaactgcaacttcatcacctacatataccgcgcttccgcggtaatcatggatataatcagttccttcgagaatcatttaaagtattcccgcaattggtcaaatccaccaatatgacttccatcaggagcaaatacctgaggcattgttaagccgatttgagtatcacgacctagtttagtcagaagctcagcaattttctcatcgtcaaaaacacctttttccggcataatgttgataaattcaaacggctgtttcttcacagccaaaagacgttttgcattatcgcaatacacacatttatggatgttgctatcataaccatatactttaaacatattattccttaattcctagtacttgtttaaaagtctcatcgtaatcaagactttggcccgtttgttctttatgtttgtatataatatcacttacttctgatagcatatttttatatgaacgagttaaagctgatttaagcacgctgtatctatcaggaaatttaccatgttcattataataagctattgctaattcacggactgccttttcagcagtctccatatattctttacgctttgtcattttcttctcggtcaaatcggtgtttacaatggcgacatttataacgaagattactagtctgccaatggaccaattgcacctgttcagttccacattcagggcaattaggaacgtttttagaagccctttcgcggcgttcaaccatgaccattacagaatcccaattaacaggagggctaatcatcgcaaccatgaatctttccacgcactttcagatcgtcttcttcaccagccataataattttaattactggaattactagaagctgcaatatcttctaatagacgctttcatttcaacacctcaatagcattacgtaaaccatttgctttggcggttaaagccttaagaactttagtatgctcttcaatttgtttttcaacttcaatcaaacgagcattgagatattcacgttcttctttcatagtatcattcccatgattgggttttggtgcagatttaaattcactagggtcctttaacttaataacaaatttagtttcaaacagtgaaagaccataattcgtattatcatcaaaggatttgactacatccatatcagataataacacgcgcaaattataagccaaagaactaatagtttcattatgtttattagcttcgcgtggtttcatatacggaagatttttatatatctcgtgcggagcacaaacaataattgacaattcaaattgtccattctgggacgatggagtgaatttagccgtaacccagtcttttacattcacattaatagtacggttatcaccatgacaaaacagtctacgagaatgcttaaaaagcatattcacgttattattgaattcgtgtgaaaattcactagcaaatttttctttactatctttagaaaaccattcttctaaataagttcttttcacgtcgttaataatattaaatgtaacaacactagcatttgatacattagtctcaatgtagcttggatacataaattttttaacattattaacagctatcacagaagatagtaatcgggaacgtttgaaccactcgagcaaagaaccaagagaatgtgaatacgcattttgtgtatctttacaaatatggttttcccatccaatataatctaaaaaatcacgaagaatattattgattactgctctgtgtccaatctgataattacggtgtttagtaataagactgccaaaataatcaatataatgtttacgagttttcatgttcttctcacttggttaatgatttatactccgagccatccttggctttaaattttacttaattaactgtaaagcttgttcaagacgatccaggcgattaacagattcttcccaaatccttttagcctgctcatattctttctgcgctttattagaaatttctagaacttctttataagctttttctagtgcaataacttctggacgaatttctaccggttcaggtgaatcgtcaagacattccattagttcctcaagggtagtttcttctttaggagtattcacaatttcatcacatttttgttggtaaatttctttatcagtcggtgagtacgcacactttacttcacgaagactaactacaattttatatccttcccaaccgcatatattcttaaaaggatatgtatgaatattttctactgtttccatacaaagtaatgcggtctctaattgacgagttatagtgctagcaattgagaaaaatttattaatattcttttggttagtttctggtgtaaaaaattcataattcacaaaaagctgctttatttttatcaagttcatattcttttatgataatcatatcagaagccaaaggatgaatttgacgataatcaccataacataatttagaagctgattttagaatttgcttcttaaaaagtctgaaattactaatccaacgacgagtaaaaatattctcagggtcttctttgacattaagatgataagaattaacatcaccgaaccaattatatcctactacatctttggttcgtttaatttctttcccaaaattaccaagaatatcccgattaaccaaatatgaaagaagacgagactctttaaaggttttcttgataacatctttatctacacggctagaaattttacgaatttcatgaataaatttagcagaagaaacaatacctgcatcaacactattgagccattgattgataatagaaagaacactattttggccaaacatcggtatagctttatcatcaatacactattgaatgatttgatatattcgttacgagtcataataatctcctcagtagaaagtaagaacattataccacatccttgtggcaaagtaaactagttcagtgcatttagtgcattgttcagtttagaacgttgcttcgtgagatttttgactttttcttgtgctttttctagcatcttttcagcttctaacacttcattagttgctttaacgagttcatcatctactgccttgatagacttctcaatcgcatccgcgtgccatttttcaacaggtttaagactcggattttcaataggaagaaaattcactttattgaatttccatgcatctttattacctgaactatacatccaaaatttaggatcgtttgataagtaattagataaatttaagttatcttgcacttcctgctttttctcttgtacaacttcgtcctttctcaaaaaatcgtatttaaataaaacgaccatatcaagttcatacgttgttgtgcctaatttaaatcgttcgaaatgctgtgaaatcttagactgaacactagcaacaacatccatatacttaaatgcttctatcaactgtgatttaaggcattcacaaattgaaagagaattttttgtattaggtttaaagctaattcgtgcagttctattattttcttttaatggtcttacttccatctgaagagtataaccatcaaatttcagattctttaagttaatatcagaaccttttaatcgactagcagtcgacaaaatttgctttaattgtttacggaatagagcaataaatctccattcaagacgataatgatttggattaaaaaatcctgttgataaatcaaccttactctgaccaacgccttgaacaaatagaggatttttataatcaatagttttacagaaatcaacgagctgctcacgagcagtcatttgtgtaatataccctgcttcattaaaattacgcacccattcactgctgttcagatgtttaaaggcgtgaatggaacaattaactttattaaggtctaaattattttcacacaaaaatgtcatagcatcacgagtatagctggcattacgaaccatatcttcaatttgagaacgagttttcatggtgttccttaagatttaagtaaatcaacaattttaattaatttttcacgttcagatttagctttactactcaatccagatagtctaaagatttcatcgtcatattgttgaatagaaatattcagctcttcaatctgtttattaaaataatcaatttgttcagaatgtttttcgttactacgaactggtacaggttttgtaggcaatttagttgaactggattcattcgggcgataaattaaaatgcaatttgaaccaatcgggcatttagcaccagatgaatattctaacgttcaagcttcttttaaaacttcaaaagctaaacagagatgatgccccatattgacataatctgtagagcgagctctgacgtaataatcatctccacgagtactaaatttaaagcatttaaggtcttctgtattattagttttaaaaatcatttgtttatctagacctttagctaatcgagcgcctaatgctaataatcgtcgttgattttcccacaaatccgcaatcatttgatcgaatgataatttcggcattagtcggccataaaggtcatatcctttattataattacgaaggatttcactcgcgttaatacgagacaatgctccaattttattaagggctttcatgatgcgattagataaactcattccagacccgtttgttcgctgtaaatgtttttctaatccaaatccaatatcaactttaaatttatctaaaatttcagcatgaacatctctgtcaataacattcaaatccaaagttgggttaaatctatgaaaaaatttatctggctctccacgacgaagtacagtccattcattcatcattttttattaactaaagatttaattactgcattgacattattaattactactgacatattttcctcactcaattttactaattacgcggaataagattgaacagactatataagtaccacatatagattgaactaataccattccaaagaaccaaacaatattatcaaacaatgtctgttttacgtcgaaaggacgtaaacttacagtaattatcgcctttttctattgatgaatacatctctggcgaaatatattcgctaaatctataaccgtctttgagttcatatacggcaataaacgataaactagacccctttccttgagttcctgtaagggtattaactacagtaacatcataatctttataatgcatataatcattaattgcgtaataaccatatgcaattactatacataaacaacatatcaataaattcaatcttttaattatcaactgtttcataataatctcaattaaaagggcttagaaccattataccatccttggtataaagcggttatgcgagtaccgtctttaaccgttcttcaaacttccgaagagtattttggcgttcagctctttgctttttgtaagtttcaatacgctctgaaatgagagtgtatcgttcatttactgattctttcataaaatcaggaatttcacgagaagctttaatctcgtcaaatttatcaataacagcttgctcttcagcaattaagttatcatacatcaaaatatctttcttgatgaactcaatatcttcttgagttacacgagataacttagatgctttatcctttttgtactgttcgttagtatcacgagaccagtgtaatgtacgatttttattcgtatttttgtaaatttctacaataccaatctcatcgataataacgatccaattccaacgggatttgtaaatttgtcctccatcaactgtgatttcacctccgattgagatgtcattaaagaacttgctttgtgcttcagatttaaatttaccatcgttgtaatttaccaggttgaaaatatctttagcgttcattttctgttcatccgtagttgatagttgtatagtaccacagaggaacggtcttgtaaacaactaaaagaaacttctttcacaattttttccactgaaccacgcgctcactgctttcttagtctcaggagcagtgttatccataaaccattcaaaggcagcctttttatgattctggagggcttctcgggctttaatctgctcacggtctattaacactaacatatgagcctttcttgtcaccaggggcttcttatgattttttgaatattcccaatcatttgtccatcgcatcgttgttgcgaattgaaatacagcttctttaatcttagtttcgtaaatttcacgagcctttgagtataacatcattacctccatttaccagtttaattctagtcatctttttgatggcagtccatataatctatttctgaactgcctttttgtcatagaaggcctcttatgaattatttcagaagagtaacctcagcgatttcttcccaaccgtttttgtcggtcataataaagtcagcaagataaagagcagtacgcagtgaaacattgcgtaaacggttaacattgactttcatccatgataatgctttataagtttcttcatcagaaagaccgcgcttttgcatcatgtcagttgaaagaataacatcttcaaccctgaccataatttcttcattagtgtgaacacccaaatccaaataaactgagcgggacactaatgcttgtaaatgtggagcaagtttagtaccacggtctaattcgcggtcaatgtcaacgtttgtgataaaaacaatcgttcctttaaattcaaactcacgctcaatgcctttttcttctaagtaagaagatgcagtgctccagcagactttacgggtctctccagtgtccagagcagctttcagaagattaagaatatccatatcagagaaaacatccacatcatcaatcaaaaggacagaattctcttcacgattattccagagctgttcataaagaccgataccagagattttaccgttaatgcttttatattcaatgtatccaatatcatttgctttatttaaagctttatctaaagaatacgttttaccaatacctgctgctcccgagataattaatgaacgaatgtttccgttaataataccattcgtcatcattcccataacattaaatcttttattaatgcgggttttcatatcttcatatgattctttaacttcttcaacttttacaccatcatatgaaatgtctgatttgtaaacccaaacaccgcgacgtttaccgtcaatttcaacaaaaactttaccatctccttgtgcatctaccggagcattatctgggaaccattcacctaagagctcaaaagttccagagatttctttaccgaagtagatacccttattgatagttacagttttcattttattctccaaatccgtatcagttgatagttgtatagtaccataaagctttatgcttgtaaaccattttgtgaaaaatttttgaaataaaaaaggggacctctagggccccctttatgcttttattccatttctattatatgcatgctctttttgctatcaaaatatatgtttttaactgttaactccgaattaattggcaataaaaactctctttcataatccaccatacaaagattatcataaagcttattaagcttattatcatcagtctggctagattcttcaattgcgattaaattttctaaaatttcaatcatagcagttgaatagtcaaaaacgtttgcattttttaacactattaaaacattagtcatatagcgttctgctgcaaatgtttcagctatatgagattcactactaaaggaagttattcttttaaatttgattctcctattaacttcaaacttataagatagtacttcctctattgtaagtcctctaaaaagtacgtctttaatctcaagtttgtctttaatgtaatcattaacacgcttatgattaaaatcattaattttgttgccaaggcatttcattaaaatatgcattgtgtttctcttcaatttttaaagaacaattaattaactacaaatatattataatatgctttatgatagaagtaaacaactttgtgaaaaaatttttgaaataaaaggggagcccgaaggctccctatcatttataataacttcggtggttttcaagataaaccttctcaaggaagtcatcccagaaacccatgtctactttttgctgcataccgttcttagaagcttcagtagatgctgcttctacttgatcgaccacatcttccaaaaactcttgaaccgttttaaatggatgtttacccaacttcacgtcgagaataaatggagcgtcttgaagtggataaaccaagtcaccagttttgtaaatttccaatagttgaagtccaccacgacaagcatggctcagagctttccagtcaatgccttcgttggcttcggccttacgggcacgttcaccatattcagcatctaatttgttcagtgactgcttaagctcaataagagaaagcgttgtctgatatttacgacccaatacagtgtagaacgtttgtgggcctgttttctcatgattatggaacacccattcacagaattcgttttctggaagacgatgcttaatatcttcaactttagtacgacgctgcttaatagaaccatcttcttggtaatcaacccattgctcggggatttgattaactactttcaatacatcacgtaatgcagccaaacgagaacccttgacaccgtatttagaagcttgcttacggacatatcctaaatatgatttcatgttagtcgtataaaaacgagaacggttgtcttgaataaacttccacacatcaggcaaatcagatttaaccactagttcaggttgagtgtgaagcatatctaacgctacagtttcaccatctgctgctaatttaaagaaatatttaagactgtatagttcatggtcaatatcatctttagtgtttttagatgatgtgttgttagtgtttttgctcatgtgctctttgacatttccgataagaatatcgcgagcaggaggaacaaaaatttctttaaaatctacatcagattctggggtagaagttccataaagatgactaccaaaatagcttttcattactgttttcatcattcagccttatattcaataacaggacatactttagctttacgaacttttaaaaattcaacgataatcgatttcttaggttgaataggaggtaaacctttatacgccctatcaatattttctacgtgtaaagcataatcctttttccatttataatctttatatttttcacgcaaatgtgcaggaataacaaatgaaccgataataagtaaaacaaccaaaagcgcaagtataaatgccgatggaagaagagtccataaactaccgaaaataagccaacgttgtaggctttctgcacaaataattgttagccctacgagtatagcacacccaaaaatagaaacgaaaaatgtaggaggcaatagaccaaaaatatgcgcatagtgtcttaggtcgttgccattcatcgttaaacagtttgaataatttatagtgccaagagttttcattaataatcataattatcctttcattgaaggcgtaacggttgttaaatacttaatcatagcttcagcttctgattttgataatgaaatttctccattgttttgacgaatagaaataaaatccggatgacggtcaccaccagcttttaaaacacatataagtatcaacttcgccttcaatatttgaaatgattgaagcagttccacatgaatgcggtttttgataaatcaatacagcttttcttccaccgtttgactgttcataggcttttaatacatcaagcaaatcagttcttttatcaatagctaaaatgttattttcatcttcaatgttaaatccttcggatacttcataaagcgttacccataaatcaccaatgtcaaaacagcatttacttttccacggctttcaagagtatgacaaattttcttgatttcgtcataactcattttaataatatcatctccttgactaaggaagatgtcatttttaaattcaacacgaattaaaccacttccacttgaaataaacatatttcctcactttgaaatcatagttggaataacagaatcaagataagtctttagtgcaatagcttcgtctttgtttaatgtaatgatatgcgatcgaaaatcgtcaatttgacgaatagatactacatctccctcttcatagcattttgaaacatttaaaatagtttcatcattctgattacaggagttagtaataatagcattacatttttaaaccattttaaattatgttttcttttagtagaatcataaaaatatttaatgttagttataaaattatcccaattattaattgataagcacattgactcgcttttaatattaaatcctgggcatgaagaataaaaatgaattttatgctcatcattaatgcttacaattttatcagtgtaagcatattcaatttgggttaaacgaacaatttcactaggcgtaatataacatatcatcttcttgcgtcaaacgatacatgttatttactttttcgatcgctaattcaccaaaaagcacactatcttctaatactaatcgtttcatattgattctcttcgactcactcataattacatactcctctgaatcatatcaataatgttattcaccaaattataagtaaacattgggtaattatattgaatcatcacatacacaacaaacaaaactttcattctcttctccttggcagttgacaagattactataccataaccttgccaacttgtaaaccattaaatgacgttttcgataaaattctgaagctttgtatgagcatcaaccatgattttcatttcttctttggcgaaagctatacctctttcacgagaagaacattcatagtcagaaactgcattagcatattcttcaattagcttcattaaaaacatctgtttttcagttttcattattccacctaatcatttcaagatattgaactaacttagctttagatttatccaaatcccttttagctgcttctataccgtcgtatgaatatccttcacaatgctcaactgctaattgatatgaatctatttcaatatcacgtgctaatttaatgattttttcaaactgttcacgtgttagcataattaaactctcgtattatgatcgataatttcatcaagaaacatatctaacgcttctaaagcattatcaactttagcttcaagttcttcaatacctgataaggcaaagttaatgcgttcctcatctgctttacgaattaaagctaccaattccttaattttatccgcttgttcgatactaatcattattccaccacatatgaaagagagaatattgcacacgccatgtgagttgcaacttcatcacacatattataacgtttcttgagaagttctacaagttcttcactagtaacttcatccatgtcgacgaaaaaatcaccattaatgatgacgtagatatttccttcttgattaagtgcttcaattttcatgatgttctcctctttatccgatagttgtatagtaccacagctcaaacggaaagtaaaccggtaaaatgaaaaaagtctcccgaaggagactaatgttattcgagggaaagaagatacttactctggtaaaacattccagtaatatcatctatcgtgctttggatggctggaggcatttctttataaatgctgttagattggtctagtatgcgatcaatcattttaattgtgtcggtaggaagtttactggcatctggaattgaaggtgtgtattttctaccagaataccccaaatattgctcacaaaatttatcaatcaaatctggcaactcggaaaaaataaaatcgtatgctttgtgtctagcataacttttagtttcaaaatgtgcagaatgaaaataagcttgtgcagccattaataaacctaagtattcatctgcctttgaaggttttccactttgtgaaaagtcgctgaatttcattcagtctccaatttaattttcataattctagcgtatgattgtgccatctccgcgcctcgctctatacattcaaaatcagaagagcacgggtcatttttataggtcgttctcataaaactatagaattgttcagacgattctacgcttttattttcaaaaagtgtataaacgtgcctaataccagattccataaatttatcaaaatgaggatcgacattcgcttcaattgatggagataaaacaaatgacaatcctagcatggcaaatagtaccgttgcttttaaggccataaaggcctcctatcatttttgtcctgtatttactttatgccgatgcacggccttaactttatcaaggtatttttcaaaatttcgcaatctagtatagtctgccggagattggttaagtgatacttctcgacgcaaagctgaaatgatatttccaacttccctacgaatttcatctaattgaagcacagtaagattgcgaagttgcttttcagttaattgtagcatatatacccctttagttagataaacctatttataacttttgcactaaccgagctttttagttaattcattccaatgttttctacacaaagaaacataaatttcatcaccaatacagatttgattaccttctttaactggtgttccatcttccattaatcgagctgtcataatcgcttttttaccgcaatgacaaactgcctttagttcaataagtttatctgcaatcgctaaaagttctttagaaccttcaaacaattttccagcgaaatcagtccttaatccataagccataacaggaacattatatgtatcaacaattcggctcaattgatgcacctgttcagtttttaaaaactgagcttcatctacaaatacgcaatgaatatctttttgtgcttcagcccatttatagaactcgaaaatatccatatcatctgtaataatattcgcttcctgcttaattccaatgcgagaaacgacttcacagacagaatcgcgagtatcaatagcaggcttaagaactaatacactcattccacgttctttataattatgtgcagcagtcaaaagagaagcagattttccagcattcattgctgcataagtaaaaattaaactcgccattttagtccttagttaaattttctaaatatgtttctaaatcattttcagctttatcgatagattttactaattcgtaatatgtttcggcatctccataatcagaagataattcaaaagacaaatccttttctaaactaataatttcaccaactaaaaataatatttcgttcttttgttcgcgagtaatcataaggaatttatataattaataagttcttgttctttattatcgaattctttagaaagttcttcgtactcgtttgcgctaaaaggaccgcattcattacaaactttttccaattcactatttttatccataacttcgtggataagagaaaagagtttgtctttttgttctttgcttaaactcatatattaatttccagaagttttaaaataattcgcttttgcttaaatatttccacagttaaatgatcagtatctttttgaccaattccaatggcaaaacctttattaacagcgagttcaattaaattatcaagttcacgtaacacttcatattgtaactcagaactattcatttcggtttaccttctttaacgaaatctggataaggataaaatcccgaataaaatccttcacctttatgattgatgcatcctttattagaacaatagcaccaataatcgaaatcacaaaccatttcatcgttgcataaagcaaaaacaaccggccatttacacttttcgcagtgggcatttttaagaatactagtttggctcataaccatgtcacctttaagcagtattcttctacatgctgtttacgacctttcttatcaataaaggtatattcaacgaatgttccaatgtagtctttatctacatcatgtggactattaattgggcatttagtacgacaaatgcgttcccattgacgaataattactgccttattatttgggtcatatggatgtggataatgtatattcataataatggttcccaatcaacaatcacaatttctaatttagaggaatatgtatctaaaatcccctcaataatatcccagttccctttacctatgcctgcgccaatcctaggcatatagattgtaggtttaatcagtttattttcaccaaactcatttaattctaacatacaattcattaaagcggaatactcaaaatttggccctggttgaaattgagtataaagattaaagcagtaagctttatgagtcctaaagtatttttcatagactgagtaagaaccgagtttagttacatcaccccattcagtctgtaatttatcagcttccaaaattttagggaaagctttggttaattgacccgctacgcctgaacccatagtatgaaaacaattacatccatgcgcaatatttttaccttcagcgaaaagggcgacaatatcgcccttgatatattttacaatcatctagtactcaatcctcgattataagaatctaccaaacggtcaaccattgaatgacaagcggctttatctttctcctccgcaactgaacattctaaggtattccactttttagcatatcgttttaataatgtatcgtttttgtatctgcttgatttatctctttctccgtctttatatgcatatattaatttctgagcaaattccgcctggcatgctttatttttcccacaataatctgccgcagtgcggtttacatattctctaatttcagtatatgatgtatctgctgacgcagaagcagaaaatgaaattaatcctatacataaaaccaaaattttagtcatttactatttccaaaagtttattatttttaaggtaattagccttttctaggacttcagaagcatatttagaacctgctttaacattccatcccgaattataagaggatattgcttttcttatatcgcccttatgtatatttaaccaataagaaagttcaatgtacgcccaggaagctgaattggatcgtttattcaacattctttttatttcagcatcggtcatattataaccaagttccttaactcttgctcgcatagtaggcaaataattttggaacattccgtaggcgtgatgatttggtttagattttaaattaactccgccagagctttcttgccataaaatggctgccattatatgacctaatccgctcttgtggatgtttttgtgtgttttatattttccatccttagaaaattgttccccgaattgatacgcgtaacgcatgttatcgagttggacattactgaaagtatgctcggagctatgtgccatcattgaaatggccaatagaccagcgagtagtgcttttctcatgcttacctcattgagttttaattactgctttagaagcctttcctggtaaacgacgactgttaataattgccattctacattgaagtgacgggtctttgaacttcgcattaggtttacaaactgtaaatccaagccaaagatttccatctgtgatttctaaacgtccaggacgatattcaattccatcaataaaatcctcgtcaatgtcaggacgcggaggcatactcaggaattcattaacttctaaaacatggtcttttattttatggaataattcaaaaacgtatgtctcatcaatctcccgttgaattgcgcgatcaagaagatgttgagaatattttagatgaaacgatgagacccctgctgcttttgatgcctcacgaatctcattgttaatttgacgaaactccgactcaaagtgacgacgaagcttatttcgacggataaaaacttctgtattgatagtcatgttgttctcctcttaactgatagaaaaattataccacagtcaagaggaaaagtaaacagttattctttaaatctaatcaatttattcatagactttgaaacttctgcacgaacctcatgtagatttttgagctgttcaagacgctgcgtatagtaagcaatttcatcttcttcgagacagtcctgcgaatcttctttaagataccgtgcatagtcctggaaagcgttacggactacttcctggaagtcatcaagactttgaattttcttaggagcaacagatacacgacgaggtgcagtataatactcataaccaaaccctgcgcttaattgatccattagtatttttcctctggttggaacactgcacgacaagcccacatactggcttctttgagtttcgttttagcaatagttaactgatcgaggctttcagcataattcttcgcgaattcacagtcttcacaattatctagtgcttcccagaattcatcatataaagcatcaaagataagtcctaaacgaacttcagcgtctttgatagcattcactttaccgattttctcttcagtatgtggtttatcccttaatatcttcaatcatatttgacttcctcaccagtacataaatcatattcaactaaacgaataggttcatgaatgccatatccctgaacagaaacttctgtcgtaggataaattccatcaatatcacccatattccaggcttcattaaattgctgttcgcctgaattactaaaccactcggcgaaagcatttatcacatctttagaaccttcaataattatctttgccattacaaactctcggtaaaggtacgagcgataacgtcgcgctgctgttccggagtcagagagttaaagcgaactgcataaccggatacacggatggtcagctgcggatatttttccggatgcttaactgcatcttccagagtttcacgacgcagaacgttaacgttcaggtgttgaccaccttcaattttaactgtaggttgtggctcaatttcaatttcacgggcatgcaaaccatagaaaatttctgggtctacaaaagagtcctctttaaaggttttagagacaataattcgtgcttgaataccatcttcaaaataaatagtacctttatgtgtgccttcaagaatttgatatgctttcatataaacctcaattagaaaataaatttatccaagattgttctttaattaaaaatggctcagaatcatatgccattaaactgtgggtaattaatcctttaaaaggtccatcaataaattccatggtaaaatatggaattttattcattagccgtgcattaggagcagtacacaaaactctgcatcctttgaatacgcctttttgtaatttgtattgcttaggataaaattcgcttaaaatgttattttttgccaaaatttcaaaatgattcaccaatttatttttaatagtttttggcgaaaaataaagatattcgaaaagctgagtgtctgtcatcattgcattccgattacgaaaaactgtggacgagtaataccaccaatacaacatttaatattacagcagcagtgtacagtgtcaatatggacactataaatcttatccatatcaggagatttgacaggctcatcaattatatacaaaattcgcgaaagcgataaacctctgaacttgcttcctttattaccaataactgcgcacagaatcagtaaataaacgaaaacgtatatcatcattagaataacgcgaaaattcctttttgatgttatttgcagaaattttagcgtaagctgaagtattagaaagaacaataactgttccgccatcatacaaccaattagcagcaaagttagtcacagcaattgatttaccagattgacgtccaccatctagtcgaagtgtgcaatactgtttaagtaagtcttcaaatggcgggatattcgtttttacaaatttcttctactctagcatcagaatggtgtgtaaaagcattcatcagggatagataaggaccagttaaaaatgttctcatttcttctctctaaatttgggccattccatggcgcatgaattgtccatttctgtatttacccattaccgcgcttgggctcgacattattacaggttggcgggaatccctcacagaatcatgaggtccaggttgttcccatgttatttgaacgatttaacgtactgaatagaacctttactattcacaaaggcaattttaccatttttgttatacatggtagcagtacgttgatagccataagtttgtttaccagattgataaccaactaatgcgaaattatcttcacccattttattctgtttagcgcgaatgcgttcatgaccatgtgccataagaaccttagcatcaccagttgcaatggatcgacgagttttttcatcttcaactgtattaacaaagtcgtcaaatgaatcaaatttagcatgagatttattatacagttttccatctactgcataattatatccctgtacatccatctcaacttctgtaccatcatccaatacagcagtgattttctgaccttttttaaatttcaaaagatcagtaaaagattcagcaataatttgagaattaatagctgcttcagtaataaattcttgataggttttcatgtgtttcctttaaatattttaattagtaattgtctattcaagtaactgtgaatatactatcacaattccaagagaaagtagacaattttatagatttttatacgcgtcacaagtgccagttctaaacgttgcaatgactcgttttgcgcgattaggtgtttgattataccatctacttttagctaagttaactgctgcttcatcccagcgtttttgttgaagcatacgtaaagagttagtaaatcctgccacaccggtttctcccatttggaagaccatattaatcaatgcacaacgacgaaccgcatcaagagaatcataaaccggttttaatttagcatttctcagaattccgcgaacagcagcatcaacatcctgattaaagagtttttcagcctcgtctttggtaattacaccattgcaattacgtccaatagctttatctaattcagatttagcaacactaagtgatggactttttgtaagcaaatgaccgatgccaatagtgtaatagccttctgtgtctttatagattttaagtctaagaccttcatctatacgcaacatttcaaatatattcataatacctcctaagtatttatagaaggtatttataaaattaaagaggttgttcattattcggtaaagtgaaggacccatcacatattgccactgagtacgaggaataagagcaaaagcgtccatctctggaatcataacgccatctttattttcaaaataagactcgcaacggcaatttctgaacatctcatgctctactggaatcgtataataaaacaactgtaggtctttattactagaatatttaaatacacctaggtcttctagaaggtctggattataattgccaaaaccagtctcttctaaacattctcttcgtgctgcatctaatgcgcttaaatcagaattttctacacggccctttggaatatcccagcgatgtgccatcattccagtcttacgagaaccagtaacccgacccataaataaatctttatcttcggtcataaagataataccagctgatagtgttttcattttaatttcctgcaatcactcacaaactctttcattgactcattttcaatataagacatgtagctattatattcctttaattgtattttgtaatccttttttctttgccaatttattttaaaattatcataatgaaaatataaaatgataccaaagaatgaaaacaatgaaataattttagtataacaaagctcactccaaacttctgttatatttactgtgccgtcgatgtttaaaataagacagtcaattaacaatccaaaaagactacccgcaagagctgcagccaacgccacagcaaaaattaaaaatgactcagaaaacgaatatttgactttatttagttttggcttttgcatcgtgattccttaacaaatttcataatttcattaaattcatactcagctagtttaagctggtgttcctttttaatctttttacaatgagctttccaatcgtgtacacgtttacgataatgtcttccttgataccagtatcctacccaatttacaggtactaataaaaatggaactaccaatggaagagttagcattaacataattattacgccagattcaatatcagtcataacatctaaaacacctccaataatcaatagaattacaaatgatatgagtatcacaggacctattaatacgtcagtaggaattatctggcgctttaattcatacttcaaaggtttacttggaaggtatagtgatggctttgacatattctctacattccttaacaaatttttctagtaataaatcactttcaaaattaggatttttcactaatttatcaaaaagaccatcaacaatagttaaaatattctttttgctaagaatacgtttattttcatgcttcgtttcagagtcaactataagagtaaagaaatatttctttccctgaaattttaccgtagtatcaatataaaataaatttgacttttgtaagttacgtttaaaccatgcgtcacttaaactataaacaccgagataatcaaaatcgtcgtttaaataacaaactgaccattcaggagaaatgaaatcagtaaattcaacatcaaaatcacatgtcaataaatgaattgattcaatattgttaataagtattccaggacgtattaaagactttttacctctggaaaatcttccagaaagactttcatcagtttcatatgaagaaccccaataataattacgtccttctgccatacgtttaagagcatttagtaattggtctggaacatcaacctgtctttggaactcttcaaacattgaattgaaatcactttgcattttcattcctatttactccaagtaatagggggccgaagccccttatcattatttcagagaattaatatattcctgaacatcggcagaggtagtttcaaccccagaaatattgccattaaaggtttcaactcgagcaagagtatcttcaatatcaaccttagtcagtgctgcaatttcaactacatcatcagcagtactaattccaagggcatttgctgcacgagtttcacggatatattccaatttaactgcaagttcttggcgagcatcatctaactcaactactttcttagcgatttcaattcgcatttcagcataaccatcagctttagtagtcagctgttcagctgttcgacgatatagcaaaccgagtttagcatgcattgttacatcttgaccttcggaaagaagcttgcgaatttcacgctcttttgattcagcctgtttattcttttcaacaataagttcacgaatacgtttttcttcattaatagatttaacagaagcagtttttaggtctttaattttatcaagcagttttgctgctgcggcagtatactgttcttcaacagatagatttttagccatagcagaaccaagtttagtgcgaataaactcaacaattttcttcagtgtgttcatagtatttccttaggttaattaagatttaaaatccatgagagtattatactccggatagtttgtaaactatttcaacatcgccttttgctgctttataaccttcagcccaagatacaaccgagtttttatctgaagattcaaattctggcattgggctttcgccaatgttcacgcaatatgtttcttcattttcgtcgaaccaaataattaaagtagtcatttatttctccgtttctgtatttgtttttgataagtctataataacaccgtccttggtgtttgtacacaattatttcatattattgaaatattcttctgcgatttcgtcgttatcatggtaaactttagaagacagtttaacataaccttcagcagtgaacatgttaatcacgacctttacagtataccactgaccatcttcattacccattactgcgtaagtttcaaacatcggatggtcaggaccgataactttaatatcattcactgtacgaccgaaatcttctgaaacacatttcataaagaagttgaacagttcaccgtaattatccattttattctccaagttgttttctgtatcagtagttgatagttgtatagtaccatggaagaacagggatgtaaacagttttgtgaaaaaatttttaaaaagttttagggaattctagggcggggaggggcaattaaaagataggataatatattataaagggtataaactaaatgatgcctagagaggtctggaaaggcctagataccaaaaagccccaacctttcggtcggggctaagccttgcggcaaccttgtcggggttccacctgctaaggcaagtgtttgtacgaaacgccgggatttgaacccggttattaagtagttgacgctactcaatatttttaaaaggccatatctcgaccatatccgaacgttccgtcaaaaacgctactcggcttacagcaaagatatttcctcgaatcgataattcggtgcgccgtttctgctgtgatagtaaagagccagaacacagtaaaactgtgggaggaactatactccagggaacatcagtccgacgacttaccggtagcgacccggtttcttaatattcttttaaagcatcaatctgttcacggcgtttacgccataaatcaattgcttcatacgcggattcagcatttcgaattagccggcatttatgtaaagacttgtgattttggtattgtgtagataatggaattttatctaaaaggtctttacgttcaaagtattcgtaaccatctaaaccaaatgaacgatttttgagaaattgccaatgcctaaattcgttttcgacataaacatagtctgcatgctgataaagcaaattaattacacgttcagaaataacagtgtcattatgattaaaatagaatgttaaatcatgaacgactaaataaacattacctttcatattttcctcacttataattggtcgaggcagtagggatcgaacctacgacccaggacttagaaggtccttgctcttccttctgagctatgcctcgtatttggcggacgtgataggattcgaacctataaccaatcgcttaacaggcgatcgctctgccattgagctacacatccaaattggtggggagtgatggagtcgaaccacccgagtcgcaatgacaatgaatttacagtccacaccgctacctctacgggataactcccccaaattaatttggtggccctgggtggaattgaaccaccatctggcgattatgagtcgcttgcttgaaccttccagctacagggccaaattttcttattttatgtaatatttatttaaaaactttctagcttgagtatggctaacatttatagcgtttgcataatttttaataaaacctcgttcatccatattaaaattttctaatatttttaatcgtctagttatctcatctttgcttaaggtacttgcattatttttagaaattttttctaaggactgtgccgagtgttttcgaccattaaaattaaaatttttagattttggaggaaatctatcatttagtctcgcatcttttgtattttgattattagttgcgcaatatatgttatttaatgaatatggtcctttatcaccgaaacggcacatgcagtattcatgaccctttcttccacgcttatcatattttcccgttgatttccaccaatagccattcatcaaaagttaaattccattcaatgtttctacgtatagcagaattccgctgagaaatattttgcataatcttctttcatcacaaatttctctacttattcaatacaccgagctaaatcagcaaaactggcggaggcgataggatttgaacctatgagtcgccggagcgactgccggttttcaagaccggtgcattaaaccactctgccacgcctccagtctccatacaaggatttgaaccttggacctcctgatcccaaatcaggcgctctaccaaactgagctacacggagtaaattaaattggagcggataatgagaatcgaactcacatcatcagattggaagtctgaggtaataccattatacgatatccgcaaatttggtgcgagaagtgggactcgaacccacaaggaaatcattccgcagcattttaagtgctgtgcctttaccaatttgaccattctcgcgctgggaataaaggactcgaacctttgcatctagcagtcaaagttctatgccttaccaacttggctaattcccaattattaacaaaggctctcaaataagaacccttgatgatagagggtattaatcaatgcgatatgagttaataataacaaatatttcttaaagcaaatcaaccattttaacagtcggcaaaacaatttcttcttcgatataagcaaattctacatgttcaactacacgcaagaaatcatattcatagtattcagaagcatgaccaagaatatcaatgaggccttcaaatatcttattaccattcacaaagaataagtcaaatacacgttcttcatcttcttcggatttattaccaaggtcaacttctatatcaaagacctttttaatgaattctggataaagttggtctgagaacagtccttcaaccaaatattcatatataaaaagctcttgctcgctgaacaacccattaccacaataacggtcagctttagtgctagaatgacgactcttaaacttcttcaaaagatatttaaattgttggagctcatgctcttctacgccaaacagtgttttggttttatagttatcaccatcattttcccaggtagtgacatcaattacgtaacccttaggaattgtgctgcctaaacgaatatacatttgttcaccatattaatgtaagtatatttaatacattcaagacccaaaggattcttgaaaatatcatattcaagaggacctttttctgtttcaataaagaaatcaaaatttactgtattaaatttacggtcttccttcactaatttaacttgagaagatgaacggtcaatgtaaaccttttcaacttcaaaacatgttaaaatgccataatcatcaatcaaggctttagccgcatcttgatcatatttatatccattttcaacggacgatactttcgcataaagaatcattattaacctttagaaattttatccataacgatagcgattaaaccaattaaaaatgctactacaagtgaaaacacattttctgctgtagtcaataatccgcatataaatccaacaaacattgaaaaactaaaagcggaagcagaaattgcaatagcaacatttcgaattaattcacaacgtttcattttattctcctcagtagttgatagggtaataatatcaccaccctatctaaaagtaaacagtttataaactattttattccgcgtgatgcaattgtattctgccgtttagcaccagtttgtttaaagtcatgattgtcgatttgatcggtacgagcaactccgaatgatgatttgatcttagctttagatcctttagttatagaaataaacatctcggaagcccctttcttaaagtccgaggcgattacttcaacgccgttcttagcaagtgacttcagaattgcctctgcatactcatcgtcaagactcgtctgagtattaataacgaatgtctttggcgcagccgcttcattgataaattctttaaatgttttcattttattttcctaattaattttgatgaggtaatagtatcacaactaaaaccctatgtaaacaactttgtgaaattattttaaatcttctaatcgtttcttcatcttagaaccgttcttagcgatttcgcctgcatcagagcataatgctaaaagcgctttaactttagtttggtctcctttaaaagatgaaggatcaacagcagcaagttctttaatacgagagaaaagacgctcagcttcagctaaagccattccaagttttacttccataccatgggaagattcagtaatagtagtttttgtagcaaactctttgaaagttttcattttattttcctaattaattttgatgagataatagtatcactacctcatcagtatgtaaacaactttgtgaaattattttaaatcatctgcccaatcgagtttaagaggctctttgtattcacgatctaatacgaccggaatttgtacatcaccgctaaatgataggggcccaacattataagacaatgttatatgcggtgtgtaatcatcaaaatcatgtgtagcacctaatgcccgcgcatacatgtgtcgacagcgcagatattcagaatctagcacaagtacaagagtcgatccatcttgtgttttccatacttctaaatgtccagaagaagctacttcaaaacttccactcgatggaacatatggaacatttactcttgaataacatatagtcgaatgaattttttctctaggaactggattaggaacacgtaaagagcgctggagttcttccagcgcatcaagtgttaattctgaaaacttagctgctacataaagacccgttgaaaagtctttaaattccattattcttcatcttttgcttcatctgcagattcagcagtaagattcttgacagcttcaacgatttcttcaactttgatggtatcgccagtgatacctactgcacgagcaatttcagccaaagttccttgcagaattttggattcttccatcagacgagccgcttggtcctgtgtatcaagaatgcgagatttcagagttacgatttcagcagacagtttttgttcaatagtttgttcagacattatagtacctttagtgtatttttaattttagaaaaaagttcttcaatagaaccatcgtttgtaattactaaatcgccatcacgaattggcaatccagcttctgtaatatgtgtatcattggatttttgaccaggacgaactacatgaattactgtagcacccatcgccctagccgcatccatttcatgatcttgacgggtatcaggaacgatataataatcataacctgagttaaatttatcaagataatctaaagcaaataattttacccagtacatgcggtcgaagttattaacaatcaaatccgtacctagggcttgcatcagacgacggactgaccattgatcttcaatattatttataacgtcagtaatcttgttaaatgctacgaaattaactgattcttttccttcgtcatcaaaaacaaacacacctttaattgggcttttaccattaagatagcaaaatgcttgttccataatcgtgattacttctaatttagtcagatttaaattagtctcacgatcatagtcaattccttcaaactctttacgagttaagcaaggatagtcagtgtttgctgcaaatactccccatgcataagccaatgcatccttaataggaccagcaagttggtatttaactgcagaataattgctcatgataaaatcagcagtagtatcttttccactacgctttacaccacttaaaaagattagtttcatgtgtttctcctcaaatttaattaagattataacacacaaaactgaagcattaaacttctgctataatttttccatctttttctacttgaaaataggtgtaaggaatcgtagctgtacatactaaagccgggtctgaatcttctgtgtagctaaattctacttcagataggtcagaaacccaaggcttataaaaatttattgacatcacgatttcagttttgctattatctaagatgtaaagcgtaatgtactcaggacctgttttttgggcagtattttcacctgtaagatagttgctagttcctagcatccattcatacattcctatccatgacttaagttcttcatcaactataaatctcacaatgagtggatcgtactcaaatgtagcacctggacgttgtgctcggcccagtccaaacggcccagtcacggtatcagtaacaggtattctaattcctggaataggaactgactgagcatttaaagtaaaagcagatgtagtattactatgtggtattgatactacaaagttagttgtatttgcttggttaaaaatttgttgcagagcttgcgacatatattcctcataatgctttataactgttggtggtataatgggtctaagtcccttccattcaattccatttagaacaaacaacagaaaagaatggaagataatagaattagatatttgaccagactttgtttgcagagaaacgttttccttttgaaacgaactgctgaagtggcatcaacacaacgttcgcccagtctttcggggcgatttcaacaaggctacccataatattaccaggtatatacgccttaatcatttgatctgcacctctaaatcctttcacttgactccaatcaatttttaatttcgttttattagtaatagtaggtgtatttgcatattgctttaaaagctcttctagaaattgctgacgagctttaggtggaatatagtgcaagttcaatccgtacattaaattatgcttacctaaaccaaggtaaattatcaaaggaaatttatcccaataaggaagagtttccttgtgtttagcatcataagcaaaagcatatattcgtcccggctgcgggcgaacaactttatgtccttttacttgcttaatagtttcggcaaaccactttctggttttattattaattgctgcaccttcattacgaattttatcacgcaatgtttgtctgaatgaatttatcataagcagttgtctttcttgcttattgagtttattcattggttttgattcaagtttttgaatcttttcagccgttttaattcctgaagcatattttgacattgctgaagtaaacgtagagtatttgattcctctttcttcagcaaattgctttcctgtcattccttttgctttggcctttttgtattcaagacctatctgaatccatttcttttcgtttaatgattgcttaacctttggaacttggggagtgctttcattaattatttgaaaaatagccattatgcccccttaaagccaagagctcgtaatccatcttctgttagaattctaaattttattccacgcttttcagctaaagattgtgctgctttccatttgtcggtattaacagaatatgtataaatttcattcataaatcttttcttcgctgcggttgttagatgtgctggtttaaccggtggttgtgtttcttttttaggttttatttcaataaaaaattcttgcccagaagaatctttcatccaaatatccatgaagtatctacgttttttcccttctgcattacaaaaataaggaattactgctgtttcactaccccatgcaataatttctggatttttatctaaccattcaaaaaagaatttttcccaatttgatctatacgtaatttttttagggtcacctctatactttgatatatttttaggaacccattttccagaatatgccattggattctccttataaatagataatatatttataaacaggagggcccatgctctttacattttttgatccgattgaatatgcggccaaaacggtgaataaaaacgcgccgactattcctatgacagatatttttagaaactataaagactattttaaacgcgctcttgcgggataccgcttacgtacttattatattaaaggttcaccacgcccggaagaattagcaaatactatatatggaaatacgcagttgtattgggttttattgatgtgtaatgataattatgatccgtattatggatggattacttcgcaagaagctgcttatcaagcatctatacaaaaatacaaaaatgtgggtggagaccaaatagtatatcatgtgaatgagaacggtgaaaaattttataatttaatatcatacgatgataatccatatgtttggtatgacaaaggcgataaagctagaaaatatcctcaatatgaaggagcacttgctgcggtcgatacgtatgaagcgtctgttcttgaaaatgaaaaacttcgtcaaataaaaataatagcaaaatcagacatcaattcatttatgaacgaccttatacgtataatggagaaatcttatggaaatgataagtaataaccttaattggtttgttggtgttgttgaagatagaatggacccattaaaattaggtcgtgttcgtgttcgtgtggttggtttgcatccacctcaaagagcacaaggtgatgtaatgggtattccaactgaaaaattaccatggatgtcagttattcaacctataacttctgcagcaatgtctggaattgggggctccgttactggtccggtagaaggaactagagtttatggtcattttttggacaaatggaaaactaatggaattgtccttggcacgtatggtggaatagttcgcgaaaaaccgaatagacttgaaggattttctgacccaactggacagtatcctagacgtctaggaaatgatactaacgtactaaaccaaggcggagaagtaggatatgattcctcttctaacgttattcaagatagtaacttagacactgcaataaatcccgatgatagaccactatcagagattccaaccgatgataatccaaatatgtcaatggctgaaatgcttcgccgtgatgaaggattaagattaaaagtttattgggataccgaaggatatccgacaattggtattggtcatcttatcatgaaacagccagttcgtgatatggctcaaattaataaagttttatcaaaacaagttggtcgtgaaattactggaaacccaggttctattacgatggaagaggcgacgactttatttgagcgtgatttggctgatatgcaacgtgacattaaatcgcattctaaagtaggaccagtctggcaagctgtcaaccgttctcgtcaaatggcgttagaaaatatggcatttcagatgggtgttggtggtgtagctaaatttaacacaatgttaactgctatgttagcaggagattgggaaaaagcatataaagccggtcgtgattcattgtggtatcaacaaacaaaaggccgtgcatcccgtgttactatgattattcttacgggaaatttggaatcatatggtgttgaagtgaaaaccccagctaggtctctatcagcaatggctgctactgtagctaaatcttctgaccctgctgacactcctattccaaatgactcgagaattttattcaaagaaccagtttcttcatataaaggtgaatatccttatgtgcatacaatggaaactgaaagcggacatattcaggaatttgatgatacccctgggcaagaacgatacagattagttcatccaactggaacttatgaagaagtatcaccgtcaggaagaagaacaagaaaaactgttgataatttgtatgatataaccaacgctgatggtaattttttggtagccggtgataaaaagactaacgtcggtggatcagaaatttattacaacatggataatcgtcttcaccagatagatggaagcaatacaatatttgtgcgtggcgatgaaactaagacagttgaaggtaatggaactatcctagttaaaggtaatgttactattgtagttgaaggtaatgctgacattacagttaaaggagatgctaccactttagttgaaggtaatcaaactaatacagtaaatggaaatctttcttggaaagttgctgggacagttgattgggacgttggtggtgattggacagaaaaaatggcatctatgagttctatttcatctggtcaatacacaattgatggatcgaggattgacattggctaatatacttccaatgagcgctgatttaggagaatccatggaaggttcttctatcgacgtcacctttaccgctcaattagaaacaggtgaaacgttagtatctataaatataactagttacgaagaaactcctggagttttagtagaagaaaatcgcttatatggaacatatgaatctgtatttggtttcggaaatgacgcgttgaaatatcgtttaggcgatgaatttaaaactgctgcttcatgggaagaacttcctactgattctatactcagttgtatttgtggaaagctcctcaaaacctccagaagacattcacttacgaagtaacattaatatatgactaccaagaacaaagtgaatctggaggttctggcagtaattctaggtcatcttctgatactactgaaccgacagatcctcctgctccagtaagaaaaactctagttaaaaattatactaaaactatagttggaaattggagtcgttgggctaataaattgagaagctatgtgtatgagaggccataaatgtcaggattaagttatgataagtgtgttactgctggccatgaagcgtggcctccaacagttgtgaatgctacacaaagtaaagtattcactggaggaattgctgttctcgtagcaggcgatccaattacagaacatacagaaattaaaaagccatatgaaacacatggcggagtgacacaacccagaacttctaaggtatatgtcactggaaagaaagctgttcaaatggctgatccaatatcatgcggtgatactgtggctcaggcatcatctaaagtattcattaaataggatttaaaatggcaaatacccctgtaaattatcaattaacaagaacagcaaatgctattcccgagatattcgtcgggggtacgtttgctgaaataaaacaaaacctcattgaatggcttaatggccaaaatgaatttttggattatgattttgaaggctcaagattaaacgttctgtgtgaccttttggcttataatacgctgtacattcaacagtttggtaatgctgctgtgtatgaaagctttatgcgtactgctaacttacgaagttcagttgttcaagctgcgcaagataacggatatttacctacttcaaaatccgctgcgcagacagaaattatgttaacatgcactgacgcattgaataggaattacattacgattcctcgcggaactcgctttttagcatatgcaaaagatacttctgttaatccatataacttcgtttctaccgaagacgttattgctattcgtgataaaaataaccaatattttccgcgtttaaaattggctcagggacgtatagtaagaactgaaatcatttatgataaattaacacctattatcatttatgataaaaatattgatagaaaccaggttaaattatatgttgatggagcggaatggattaactggacgagaaagtcaatggttcatgctggttcaacatcaacgatttactatatgcgtgaaactattgatggaaacactgaattctattttggcgaaggtgaaatttctgttaatgcttctgaaggagctttgactgctaattatattggaggtcttaaacctactcagaactctacgattgttattgagtacatcagtactaatggtgctgacgcgaacggagcagtaggattttcatacgcagatacattaacaaatataactgtcatcaatattaatgaaaatccaaacgatgacccagattttgttggggcagatggaggcggtgatccagaagatattgagcgtattcgcgaattgggtactattaaacgcgaaacccaacaacgatgcgtaactgcgactgactacgatacattcgtttcagagagatttggttctattattcaagcagttcaaactttcactgattctactaaacctgggtatgcatttattgctgctaaacctaaatcaggattgtatttaactactgtacaacgtgaagatattaaaaattatctcaaagactataatttagctcctattacgccatcaattatttctcctaattatctttttattaagactaatttaaaagtcacatatgctttaaataagctgcaagaatccgaacagtggcttgaaggtcaaataattgataaaattgatcgctattataccgaagatgtagaaatttttaactcatctttcgctaaatctaagatgttgacatacgtagatgatgcagatcattctgtcattggttcatcagcgactattcaaatggttcgtgaagtacaaaacttctataaaacgcctgaagcgggtattaaatacaataatcaaataaaagatcgttctatggaatctaatacgttttcatttaattctggacgaaaggttgtaaatcctgatactggtttagaagaagatgtattatatgacgttcgtatagtatcaacagaccgagattctaaaggaattggtaaagttattattggtccatttgcttctggcgatgttacagaaaatgaaaacattcagccgtatacaggcaacgattttaacaaattagcaaattctgatggacgtgacaaatactatgttatcggtgaaataaattatccagctgatgtgatttattggaatatcgctaaaattaatttaacatctgaaaaatttgaagttcagactattgaattatattctgacccaaccgatgatgttatctttactcgcgatggttcactgattgtatttgaaaatgacttacgtccacaatacttaactatcgatttggagcctatatcacaatgacagtaaaagcaccttcagtcactagtctcagaatttccaagttatccgcaaatcaggtgcaagtacgctgggatgacgttggtgctaatttctactattttgtagaaatcgctgagacaaaaacaaactcgggggaaaaactcccgagtgatcaatatcgttggattaatttaggatatacagcaaataatagtttcttttttgatgatgctgatccattaacaacatacattattagagtagccacagctgcgcaagattttgagcagtctgactggatttatacagaagagtttgaaacttttgctacaaatgcttatacatttcaaaacatgattgaaatgcaattagccaataaattcattcaggaaaaatttactcttaataattctgattatgttaattttaataatgacactataatggctgcattgatgaatgaatcgttccaattcagcccatcatatgttgatgtttcatcaatcagtaattttattattggtgaaaatgagtatcatgaaatacaaggttctattcaacaagtatgtaaggatattaaccgagtttatttgatggaatcagaagggattctatatctttttgagcgttatcaacctgtagttaaagtatctaatgataaaggacaaacctggaaagatgtaaagctcttcaatgaccgtgtaggatatcctttatctaagactgtatattaccaatctgcaaacacaacatacgttctaggatacgacaagattttctacggccgtaaatctactgatgttagatggtccgctgatgatgttagatttagttcacaggatataacattcgctaaacttggtgttcaattgcatctaggatttgatgtagaaatttttgtcacttatgcgactttacctgcgaatgtatatcgaattgcagaagctattacctgcacggatgattatatctatgttgttgccagagataaagttagatacataaaaacgagtaatgcacctatagattctgatccattatctccaacatattcggaaagactttttgaacctgataccatgactataactggaaatcctaaagcagtatgttataaaatggattctattggtgataaagtttttgctcttattattggtgaagttgaaacattaaatgccaatccgaggacttcaaaaataattgattccgctgataaaggaatatatgttttaaatcatgacacaaaaacatggaaaagagttttcggtaatactgaagaagaaagaagacgcattcaacccggatatgcgaatatgtcaactgacggtaaattagtttctctgtcttcgagtaattttaaatttttaagtgataatgttgttaatgaccctgaaactgcagcaaaatatcagttaattggcgctgttaaatatgaatttcctcgtgaatggttagctgataagcattatcatatgatggcatttatagctgatgaaaaatctgattgggagacttttactcctcaaccaatgaaatactacgcagaaccgttctttaactggtctaaaaaatctaacacacgttgttggataaacaactctgatagagttgtagtagtttatgctgatttaaaatacaccaaagttatagaaaatattccggaaacatcgccagatagattagttcatgaatactgggatgatggtgattgcactatagtaatgccaaatgttaaattcactggatttaaaaaatacgcatcaggaatgcttttctataaagcctctggtgaaataatttcttactatgattttaactatcgtgtgagagatacagtagaaattatttggaagccaactggagtatttttaaaagcatttttacaaaaccaagagcatgagactccttggtcaccagaagaagagcgtggattagctgacccagatttaagaccattaattggcacaatgatgcctgattcttatttgctacaggattcgaattttgaagcattttgcgaagcatatattcaatatctttctgatggatacggaactcaatacaataatttacggaatcttattcgtaatcagtatccacgagaagagcatgcatgggaatatttgtggtcagagatatataaaagaaacatttatttaaatgctgataaacgcgatgctgttgcgagattctttgaatcacgtagctacgatttttattctactaaaggaattgaagcatcatacaagtttctttttaaagttctttataatgaagaagttgaaattgaaattgaatctggggctggtactgaatatgacataatcgttcaatctgattctttgactgaagatttagtaggacaaacgatttatacggcaacaggaagatgtaatgttacttatatagaaagaagctattctaatggtaaattgcaatggaccgtaactattcataatcttttgggaagattaattgctggtcaagaagttaaagcagaaagactccctagttttgaaggcgaaattattcgtggcgttaaaggaaaggatttgcttcaaaacaatatagactatattaatagaagtagatcatactatgtaatgaaaattaaatccaatttaccttcttcccgctggaaatctgacgttattcgttttgttcatccagtaggatttggatttatagcaattacccttttaacaatgtttattaatgttggtttaactcttaaacatacagagactataattaataaatacaaaaactataaatgggattctggattgcctactgaatacgctgatagagtagctaaattgactccaactggcgaaattgagcatgattcagtaacaggcgaagcaatttatgagcctggcccaatggctggtgtaaaatatcctcttcctgatgactataatgctgaaaataataattcaatatttcaaggtcaattgccgtctgaacgacgtaaattaatgagtcctttatttgatgcatctggaacaacatttgcacaatttagagatttagttaataaacgtctaaaagacaatataggaaatccaagagaccctgaaaatccaacacaggttaaaatagatgaatgattcaagtgttatctatcgtgcgatagttacttcaaaatttagaacagaaaaaatgttgaatttttataattcaattggaagtggtccggataaaaacactatctttatcacatttggaagatcagaaccgtggtcatcaaatgaaaatgaggtgggctttgccccaccttatcctaccgattctgtattaggtgtaactgacatgtggactcatatgatgggaacagtaaaagttcttccatcaatgcttgatgcagttattcctcgtcgagattggggagatactagatatccggatccatacacatttagaattaacgatattgtagtgtgtaactcagctccttacaacgctactgaatcaggcgcgggttggttagtgtatcgttgtttagatgttcctgataccggaatgtgttcaatagcatctttaactgataaagatgaatgccttaaattaggaggaaaatggactccttctgctaggtcaatgactccgcctgaaggccgaggagatgctgaaggaacaattgaacccggagacgggtatgtgtgggaatatctttttgagattccgcctgatgtatctataaatagatgcacgaatgaatatatcgtggttccttggactgaggaattaaaagaggacccgactagatggggatatgaagataatctcacttggcaacaagatgattttggattaatttaccgtgttaaggcaaatactattcgttttaaagcatatttaaactcagtttattttcctgaagctgcattgccaggaaataaaggatttagacaaatatcaataatcacgaatcctcttgaagctaaagttcatccaaatgacccaaacgttaaagctgaaaaggattattatgacccagaagatttaatgaggcattcgggcgaaatgatttatatggaaaataggccacctattattatggcaatggatcaaacagaagaaatcaatattctgtttacattttaaattaagggagcccatgggctccctttttctttataaatactataaactcataaggaaaccgctatgttcattcaagaaccaaagaaattgattgataccggcgaaattggtaacgcttctactggtgatatcttattcgacggtggtaataaaattaatagtgattttaacgcaatttataatgcgtttggcgatcagcgtaaaatggcagtagcaaatggcactggagcagatggtcaaattatccatgctactggatattatcaaaaacactctattacagagtacgcaactccagtaaaagttggcactaggcatgatattgatacctctactgtaggtgttaaagttatcattgaaagaggcgaacttggcgactgcgttgaatttattaactctaatggatcaatatcagttactaatcctctaacaattcaagctattgattcaattaaaggtgtttcaggtaatttagtagtaactagcccatatagtaaagttactttacgctgtatttcatctgataattctacatcggtttggaattattctattgaaagtatgtttggacaaaaggaatcaccagctgaaggtacatggaatgtttctacatccggatcagttgatattccactatttcaacgcactgaatacaatatggctaaattgctagttacgtgccaatcagtagatggaagaaaaattaaaacagcagaaataaatattcttgtggatactgttaattcagaggtaatttcttctgaatatgctgtcatgcgagttgggaatgaaaccgaagaagatgaaatcgctaatattgcatttagtattaaagaaaactatgtaacggcgactataagttcttcaactgtcggtatgagagcagcagttaaagttatcgctacgcagaaaatcggggtggctcaataatgaaacaaaatattaatatcggtaatgttgtagatgatggtaccggtgactacctgcgtaaaggtggtataaaaataaatgaaaactttgatgagctttattatgaactcggtgatggtgatgttccatattcagccggtgcctggaaaacttataatgcttcatcaggacaaacattaacagcagaatggggaaaatcatacgctattaatacatcttctggaagagtgactataaatcttccaaagggtacagttaatgattacaacaaggtaattagagctagagacgtatttgctacatggaacgtcaacccagttacactagtagctgcttccggcgatacgattaaagggtctgcagtaccagttgaaattaatgttcaattcagcgatttagaactagtgtattgtgccccaggacgttgggaatatgtcaaaaataaacaaattgacaaaattaccagttcagacattagtaatgtagctcgtaaagaatttttagtcgaagtccaagggcaaacagactttttagatgttttcagtggaactagttataatgtaaataacatcagagtaaaacatcgtggtaacgaattatattatggcgatgtgtttagcgaaaacagcgattttggctctccaggcgaaaatgaaggagaactggttcctcttgatggatttaatattcgattaagacagccttgtaatattggtgacactgttcaaattgaaacatttatggatggtgtatcgcagtggagaagttcatatacaagacgtcaaattagattgttagattcaaaattaacgtcaaaaacttctctagaaggaagtatttacgttactgatttatcaacaatgaaatcaattccattttctgcttttggattaattccaggagaacctattaatcctaattctcttgaagttagttttaatggaattttacaagaattggctggaacagttggaatgccattatttcattgtgttggtgccgattcagacgatgaagtagaatgctctgttttaggtggaacttgggaacaatctcataccgattattcagttgaaactgatgaaaacggcataccagaaattttacatttcgatagagtatttgagcatggtgacattatcaatatcacctggtttaataatgatttgggtacattattaacaaaagatgagattattgatgaaactgataatctctatgtatcgcaaggaccgggagtagatatttccggtgatgtaaatttaacagactttgataaaattggttggccaaatgtagaagcagttcaatcttatcaacgcgaatttactgctgtttcaaatatctttgatacgatttatcctattggaactatatatgaaaacgctgttaatccaaataaccctgttacatatatgggattcggctcatggaaattatttgggcaaggaaaagttttagttggatggaatgaagatatttcggaccctaactttgctctaaataacaacgatttagattctggtggaaatccttcgcatactgcaggcggaacaggtggttctacttctgttacattggaaaatgctaatcttcctgcaaccgagacagatgaagaagttctaatagttgatgaaaatggatcagtcattgttggtggatgtcaatacgatccagatgaatccggtccaatttatactaaataccgtgaagctaaagcatctactaactctactcacactccgccaacatcaataactaacattcaaccatatattacagtttatcgttggataaggattgcataatgagtttacttaataacaaagcgggagttatttcccgcttagccgattttcttggttttagacctaaaactggcgacattgatgtaatgaatcgtcaatcagtcgggtcagtgacaatatctcaattagcgaaaggattttatgaaccaaacatagaatcagctattaatgacgttcataatttttctataaaagacgttggtacaattattactaataaaactggtgtttctcctgagggtgtttctcaaactgattattgggcattttctggaactgtaacagacgattctcttcctccgggttctcctgttacggtattagtatttggtcttccagtttcagcaacaactggaatgacggcaattgagtttgttgcaaaagttcgtgttgcccttcaagaagctattgcatcatttactgctatcaactcatataaagaccatccaacagatggtagtaaattagaagttacttatttagataatcaaaaacatgtattaagcacatattctacatatggaataactatttcgcaggaaattatttctgagtctaaacctggctatggtacatggaatttattaggcgcacaaactgtaactttagataatcagcagactcctacagtattttatcattttgagagaacagcatgagtaataatacatatcaacacgtttctaatgaatctcgttatgtaaaatttgatcctaccgatacgaattttccaccagagattactgatgttcaggctgctatagcagccatttctcctgctggcgtaaatggagttcctgatgcatcgtcaacaacaaagggaattttatttcttgccactgaacaggaagttatcgatggaactaataataccaaagcagttacaccagcaacgttggcaacaagattatcatatccaaacgcaactgaagctgtttacggattaacaagatattcaaccgatgatgaagccattgccggagttaataatgaatcttctataactccagctaaatttactgttgctcttaataatgtctttgaaactcgtgtttcaactgaatcatcaaatggggttattaaaatttcatctttaccgcaagcattggcaggtgcagatgatactactgcaatgactccattaaaaacacaacaattagctgttaaattgattgcgcaaattgctccttctaaaaatgctgctacagaatctgagcaaggtgtaattcagttagctacagtagcacaggctcgtcagggaactttaagagaaggatacgcaatttctccttatacgtttatgaattctactgctactgaagaatataaaggcgtaattaaattaggaacgcaatcagaagttaactcgaataatgcttctgttgcggttactggagcaactcttaatggtcgtggttctacgacgtcaatgagaggcgtagttaaattaactacaaccgccggttcacagagtggaggcgatgcttcatcagccttagcttggaatgctgacgttatccaccaaagaggcggtcaaactattaatggaacacttcgcattaataatacgcttacaatagcttcaggtggggcaaatattaccggaacagttaacatgactggcggttatattcaaggtaaacgcgtcgtaacacaaaatgaaattgatagaactattcctgtcggagctattatgatgtgggccgctgatagtcttcctagtgatgcttggcgtttttgccacggtggaactgtttcagcgtcagattgtccattatatgcttctagaattggaacaagatatggcggaagctcatcaaatcctggattgcctgacatgcgcggtctttttgttcgtggctctggccgtggctctcatttaacaaatccaaatgttaatggtaatgaccaatttggtaaacctagattaggtgtaggttgtactggtggatatgttggtgaagtacagaaacaacagatgtcttatcataaacatgctggtggatttggtgagtatgatgattctggggcattcggtaatactcgtagatcaaattttgttggtacacgtaaaggacttgactgggataaccgttcatacttcactaatgacgggtatgaaattgacccagcatcacaacgaaattccagatatacattaaatcgtcctgaattaattggaaatgaaacacgtccatggaacatttctttaaactacataattaaggtaaaagaatgacagatattgtactgaatgacttaccattcgttgacggccctcctgcagagggccagagccgcatttcctggattaaaaacggcgaagaaatattaggagctgacacgcagtatggaagcgaaggttcaatgaatagacctacagtttctgtactaagaaatgtcgaagttctcgataaaaacattggaatacttaaaacatctttagaaaccgcaaatagtgatattaaaacaattcagggcatcttagatgtatctggtgatattgaagctttggcccaaataggtatcaataaaaaggatatttctgacctcaaaacgctaaccagtgaacatacagaaatattaaatggacctaatagtacagttgacaacattcttgctgatattggtccatttaactctgaggccaactctgtatacagaacaatcagaaatgatttactgtggataaagcgtgaacttggacaatacgcaggtcaagatattaatggtcttcctgttgtaggaaatcctagtagtggaatgaagcatcgcattattaataatactgatgccattacttcacagggaatacgtttaagcgaattagaaacaaaatttattgaatctgatgtaggttctttgactattgaagttggtaatcttcgtgaagagcttggaccgaaaccaccatcattttcacaaaacgtttatagtcgtttaaatgaaattgacactaaacagacaacatttgaatctgacattagtgctattaagacctcaataggatatccaggaaataattcgattattactagtgttaatacaaacactgataatattgcatctattaatttagagctaaatcaaagtggaggtattaaacagcgtttaaccgttattgaaacttctattggttcagatgatattccttcgagtattaaaggccaaatcaaagataatacaactttaatcgaatctctaaatggaatcgtcggtgaaaacacttcatctggtttaagagcgaatgtttcatggttaaacaaaattgttggaactgattctagcggtggacaaccttctccttctgggtctcttttaaaccgagtttctacaattgaaacttctgtttcaggattgaataacgatgttcaaaacctacaagtagagattggtaataatagcgcaggaattaaagggcaagttgtagcgttaaatactttagtaaatggaactaatccaaacggttcaacagtcgaagaacgcggattaaccaattcaataaaagctaacgaaaccaacattgcatcagttacacaagaagtgaatacagctaaaggtaatatatcttctttacaaagcggtgttcaagctctccaagaagccggttatattcctgaagcgccaagagatgggcaagcttacgttcgtaaagacggcgaatgggtattgctttctacctttttatcaccagcataacatggggccgcaaggccccaaaggattttaaatgtcaggatataattctcagaatccaaaggaactcaaagatgtcattctaagacgtttaggggctccaattattaatgttgagttaacacccgatcaaatttacgattgtatccagcgtgccctagaattatacggtgaataccattttgatggactcaataaagggtttcatgtgttttacgtaggggatgacgaagaaaagtacaagaccggagtcttcgatttaagaggttctaacgtatttgcagtaactcgcattttacgcacaaatattgggtcaataacatctatggatggaaacgctacatatccgtggtttactgactttcttttgggaatggctggtattaatggcggaatgggaacgtcttgtaatagattttatggaccaaatgcctttggtgccgatttggggtattttactcaacttaccagttatatgggaatgatgcaggatatgctctctcctattccagacttttggtttaattcagcaaatgaacagctcaaagtcatgggaaacttccaaaaatatgatttaattatcgtagaaagctggactaaatcatacattgatacaaacaaaatggttggaaatacagtaggatatggaacagtcgttccacaagataactggtcattatctgaacgatataataacccagacaacaatttagtaggtcgtgttgttggtcaagacccaaatgttaagcaaggtgcttacaataatcgttgggtgaaagactatgcaacagctttagctaaagaattaaatggtcaaattttagcacgccaccagggaatgatgcttcctggcggtgttacaattgatggacaacgcttaatagaagaagctcgattagaaaaagaagcactgcgcgaagaattatacttacttgaccctccatttggaattttggtaggttaatatggctacttacgataaaaatctttttgctaaattggaaaaccgcacaggttattctcagaccaatgaaactgaaatactaaatccttatgtaaatttcaatcattataaaaacagccaaatattagctgatgtattagtagctgaaagcattcaaatgcgaggtgtagaatgctattatgttccaagagagtatgtttcccctgatttgatattcggcgaagacttgaaaaataaatttactaaagcttggaaatttgctgcatatttaaattcatttgaaggatatgaaggagctaaatcgttctttagtaattttggtatgcaagtacaggatgaagttactttgtccattaatccaaacttgtttaaacaccaagtaaatggaaaagaaccgaaagaaggcgatttgatatattttcctatggataacagcttatttgaaattaactgggttgaaccatatgatccattttatcaattaggccaaaacgctattcgtaaaattacggcaggtaaattcatttattctggagaagaaattaatccagttctacagaaaaatgaaggaattaacattccagaatttagtgaattagaattaaatcctgttcgcaatcttaacggtattcatgacattaatattgatcagtatgctgaagtagatcaaattaattctgaagctaaagaatatgttgaaccctatgttgttgtcaataacagaggcaaatctttcgaatctagcccatttgataatgatttcatggattaataaatattataaactaattaaagcccagattaggagaagtcatgtttggttatttttataattcgtcttttagacgatatgctaccttgatgggcgatttgttttcaaatatccaaatcaaacgtcagttagaatctggtgataagtttatacgtgttcctattacatatgcatcaaaggaacactttatgatgaaattgaataaatggacatcaataaattcacaagaagatgtagctaaagttgaaaccattctacctcgtataaatttacatttagttgattttagctataatgctccatttaaaacaaacattttaaatcagaatttactgcaaaaaggtgcaacttctgtagtatcgcagtataatccatctcctattaaaatgatttatgaattgagtatctttactcgctacgaagatgatatgtttcaaatagttgaacagattcttccatattttcaacctcattttaatacaactatgtacgagcagtttggaaatgatattccatttaaaagggatatcaaaattgtactgatgtctgctgctatagacgaagctatagatggggataatttatctcgtcgtagaattgaatggtcattaacatttgaagtaaatggatggatgtatcctccagtagatgatgcagaaggattaattcgtactacttatacagattttcacgccaatacaagagatttgcctgatggcgaaggtgtttttgaatctgtcgatagcgaagttgttcctcgagatattaacccagaagactgggatggaacagtaaaacaaactttcactagtaatgtaaatagaccaacaccgccagaacctcctggcccaagaacatagaggttattatggaaggtcttgatataaacaaacttttagatatttctgacctccccggaattgacggggaggaaatcaaagtatatgaacctctgcaattagtagaagttaaaagcaatccacaaaaccgtactcctgacttagaagatgattatggagtagttcgtcgaaatatgcattttcaacaacaaatgctaatggacgcggccaagatttttcttgagacggcaaagaatgctgattctcctcgtcacatggaagtatttgcaactcttatggggcaaatgactacgacgaacagagaaatactgaagcttcataaagatatgaaagatattacatctgagcaggttggcaccaaaggcgctgttcctacaggtcaaatgaatattcagaatgcgacagtattcatgggttcaccaacagaattaatggacgaaattggtgatgcttacgaggctcaagaagctcgtgagaaggtgataaatggaacaaccaattaatgcattaaatgatttccatccgttaaatgaagctggaaaaattttaataaaacacccaagcttagcggaaagaaaagatgaagatggaattcattggataaaatctcagtgggatggaaaatggtatcctgaaaaattcagtgattaccttcgtctacacaaaatagtaaaaattccaaacaactctgataagcctgaattatttcaaacttataaagataagaataataaaagatctcggtatatgggtcttcctaacttgaaacgagctaatattaaaacacaatggactcgtgaaatggttgaggaatggaaaaaatgccgagacgatattgtttattttgcagaaacatactgtgctattactcatattgactatggtgtcataaaggttcaattacgtgactatcagcgtgatatgctcaaaataatgtcatctaaacgtatgactgtttgtaatctatcgcgtcagctcggtaaaacaacggtagtagctattttccttgcacactttgtatgttttaacaaggataaagctgtaggtattcttgcgcacaaaggctcaatgtctgcggaagttttagaccgtactaagcaagcaattgaactgcttcctgactttttacagccaggtatagttgaatggaataagggttcaattgaactagataatggttcttcaattggcgcttatgcttcctctcctgacgcagttcgtggtaactcgttcgcaatgatttacattgacgaatgtgcgtttattccaaacttccatgattcctggcttgctattcaaccagtaatttcatctggtcgtcgttcgaaaattattattactacgactcctaatggattaaatcatttttatgatatttggactgctgctgttgaaggtaaatctggatttgaaccatatactgctatttggaattcagttaaagaacgtctttataacgatgaagatatttttgacgatggatggcaatggagcatacaaaccattaatggttctactttagctcaatttcgtcaagaacacaccgcagcgtttgaagggacttctggtacattaatttcgggaatgaaattagctattatggatttcattgaagtaactccagatgatcatggttttcatcgatttaaaagccctgaaccagatagaaaatatattgcaactctagactgctcagaaggtcgtgggcaagattaccacgctttgcatattattgatgttaccgatgatgtgtgggaacaggttggtgttttgcactcaaacactatttctcatttaattctacctgacatcgttatgcgttatttagtagaatacaatgaatgcccagtttatattgaattaaatagtactggtgtgtcagttgcaaaatcgctttatatggatttagaatacgaaggtgttatctgtgattcatatactgatttaggaatgaaacaaactaaacgcacgaaagcagtaggatgttccacgctaaaagaccttattgaaaaagataagcttattattcatcaccgagcgactattcaagaatttagaacgtttagtgaaaaaggcgtgtcttgggcggctgaagaaggttatcacgacgatttagtaatgtctttagtaatttttggatggttatcaacacaatcaaaatttattgattatgcggataaagatgacacgcgattagcatctgaagtattttcaaaagagcttcaagatatgagcgacgactacgcgccagttatatttgtggattcggttcattctgctgagtatgttccagtatctcatggtatgtcaatggtataaatatattaaagcatattaaagaggattaaaaatgactttattatctccgggcattgagctcaaagaaactacggttcaaagcaccgtggttaataactctactggtacagcagctttggccggtaaattccagtggggtcctgcttttcagattaaacaggttacaaatgaagtagatttagttaatacttttggtcaaccaaccgctgaaactgctgactattttatgtctgcgatgaatttcttgcagtacggaaatgacttacgagtagttcgtgctgttgatagagataccgctaaaaactcatcaccaatcgctggtaatattgaatacacaatttctaccccaggtagtaactatgcggttggagataaaatcacagtcaaatatgtttcagatgatattgaaactgaaggtaaaattactgaagtagacgcagatggaaaaattaagaaaattaatattcctactgcaaaaattatcgctaaagcgaaagaagtcggtgaatatccaacactaggttctaactggactgcggaaatttcttcatcttcctctggtttagctgcagtaataactcttggaaaaattattactgattctggtattttattagctgaaattgaaaatgctgaagctgctatgacagcggttgactttcaagcaaatcttaaaaaatatggaattccaggagtagtagcgctttatccaggcgaattaggcgataaaattgaaattgaaatcgtatctaaagctgactatgcaaaaggagcttctgcattactcccaatttatccaggtggtggtactcgtgcatctactgccaaagcagtgtttggatatggaccgcaaactgattcacaatacgctattatagttcgtcgcaatgatgctattgttcaaagcgttgttctttcaactaagcgtggtgaaaaagatatttacgatagtaacatctatatcgatgactttttcgcaaaaggcggctcagaatatatttttgcaactgcacaaaactggccagaaggcttctctggaattttaactctgtctggtggattatcatcaaatgctgaagtaacagcaggagatttgatggaagcttgggacttctttgctgaccgtgaatccgttgatgttcaactgtttattgcgggttcttgtgccggtgaatctttagaaacagcatctactgtccaaaaacacgtcgtttcaattggggatgctcgccaagattgcttagtattgtgctctcctccgcgtgaaactgtagttggaattcctgtaactcgtgcagtagataatttagttaactggagaactgcggcaggttcatacactgataataactttaatatcagttcaacctacgcagcaattgatggtaactataagtatcagtatgacaaatataatgatgtgaatcgttgggttccattagcagctgatattgctggtttatgcgcaagaactgataacgtatctcagacttggatgtctccagctggttataatcgtggccagattcttaacgttattaaacttgctattgaaactcgccaggctcagcgcgaccgtttataccaagaagctatcaacccagtaactggtacaggtggcgatggttacgtattgtatggtgataaaacagctacttctgttccttctccatttgatcgtattaacgttcgtcgtctgtttaatatgttgaaaacgaatatcggacgtagttcaaaatatcgtttgttcgaattaaacaacgcgtttactcgttcatcattccgcacagaaactgcccagtacttgcagggaattaaagctctcggtggaatttatgaatatcgtgtagtttgcgatacaacaaataacactccgtcagtaattgatagaaatgagtttgttgcaacattctacatccaacctgcgcgcagtataaattatattactttgaatttcgtcgcaacggctactggtgcagatttcgatgagttaactggtcttgcaggttaatacggtgcattctaaaggcctgtttcggcaggccatataaatacactatatccttaattctttaattctatatgccctaggttaaacatagggatataaatactacagaggctaatatgtttgtagatgatgtaacacgcgcgtttgaatcaggtgattttgcgcgacctaacttattccaagtagaaatttcttatcttggacaaaattttacgtttcaatgtaaagccactgctttaccagctggtattgtagaaaaaattccagtcggatttatgaaccgtaaaattaacgtagcaggcgatcgtacattcgatgactggactgttacagtaatgaacgatgaagctcatgatgctcgccagaagttcgttgattggcaaagcattgctgcggggcaaggaaacgaaattactggtggaaaacctgcagagtataaaaagagcgctatcgttcgtcaatatgctcgtgacgctaaaacagtaacaaaagaaattgaaattaaaggtctgtggcctactaacgtgggtgaacttcaattagattgggattcaaacaatgaaatccaaacatttgaagtaactcttgctctcgattattgggaataaaatgaatggggagaaatccccatcctgcttaaagcagagaagtccattataaatataactataattcccatttggagaatacaatgaaatttaatgtattaagtttgtttgctccatgggctaaaatggacgaacgaaattttaaagaccaagaaaaagaagatcttgtttccattacagccccaaagcttgatgatggagcgagagaatttgaagtaagctcgaatgaagctgcttctccttataatgctgcattccaaacaatttttggttcatatgaaccaggaatgaaaactactcgtgagcttattgatacatatcgtaatctcatgaataactatgaagtggacaatgcagtttcagaaatcgtttcagacgctatcgtctatgaagatgatactgaagttgtagcgttaaatttggataaatctaaatttagtccaaaaattaaaaatatgatgttagatgaatttagtgatatattaaatcatctatcgtttcaacgaaaaggttctaatcattttagacgttggtatgttgattcaagaattttctttcataaaatcattgatccaaaacgtccaaaagaaggcataaaagaattacgtagattagaccctcgccgagttcagtatgttcgtgaaattataacagaaactgaagctggcacaaaaatagttaaaggttacaaagaatattttatatatgatactgcccatgagtcatatgcatgtgatggtagaatgtatgaagctggcacaaaaataaaaattcctaaagctgccgtcgtttatgcccattctggattagttgattgttgcggtaaaaatatcatcgggtatttgcatcgtgctgttaaacctgctaaccaattaaaattattagaagatgctgtagtcatttatcgcattactcgtgctcctgaccgtcgtgtttggtatgtagacacaggtaatatgcctgctcgtaaagctgctgagcacatgcaacatgttatgaacacgatgaaaaaccgtgtagtatatgatgcatcaacaggtaaaataaaaaatcaacagcataatatgtctatgaccgaagactattggttgcagcgccgtgatggtaaagctgtgacagaagttgatactcttcctggtgctgataatactggcaatatggaagatattcgttggtttagacaagctctttatatggcattacgtgttcctctttcacgcattccgcaagaccaacaaggcggtgtgatgtttgattctggaactagcattacacgtgatgaattaacgtttgctaaatttattcgtgagttgcagcacaagtttgaagaagttttcctagatccgcttaaaacaaatcttttgcttaaaggtataattacagaagatgagtggaatgatgaaataaataatattaagatagaatttcatcgggatagctactttgctgagctcaaagaagcagaaattttggaacgaagaattaatatgctaaccatggcagaaccatttattggtaaatatatttctcacagaactgctatgaaagatattttgcagatgactgatgaagaaatagaacaagaagccaagcaaattgaagaagagtctaaagaggctcgtttccaagaccccgaccaagaacaagaggatttttaatggaaggtttaattgaagctattaaatcaaacgacctcgtagccgctcgtaaattatttgctgaagccatggctgcaagaacgattgatttaattaaagaagaaaaaatcgctatcgctcgtaatttcttaatcgaaggtgaagaacctgaagacgaggatgaagatgaagatgatgacgaagatagcgatgataaagacgaagactctgacgaagacgaggatgatgaataatgcttctgatccctgaaactcatgaattagttctcgaaagtgtcgaagcacttattactgaagcacagggtcgctttgacgaattgtcttctgctttaaataaagacgatataaatacaattgtcgagaatatgcttgatgatgaaactgatttagcggttgcattagcttctattaatgaaaatatgccgttaaatgaatttatcgttaaacatgtttccgcccgtggtgaaattactcgcactaaagatcgcaaaacccgcgaacgaaatgcatttcaaaccactgggctgtctaaagcaaaacgtagacaaattgctcgtaaagctaccaaaacgaagattgccaatccagcaggtcaatctcgtgctcagcgtaagcgtaaaaaagctcttaaacgccgtaaagcattaggattaagctaatgaatgaaccccaattactaattgaaacttggggtcaacctggcgaaattattgatggcgtgccaatgcttgaatctcatgatggaaaagacttaggtttaaaaccgggtttatacatcgaaggaatattcatgcaagcggaagtcgtcaatagaaataaacgtctttatccaaaacgtatattagaaaaagcggtaaaagactatattaatgagcaagttttaactaaacaagctctcggagaattaaatcatcctccacgcgctaatgttgacccgatgcaagccgctatcattatagaagatatgtggtggaaaggaaatgacgtatacggacgagctcgtgttattgaaggtgaccatggtcctggagataaattagcagctaatattcgtgccggatggattccaggagtttcttctcgtggattaggttcattgactgacacaaataaaggttatcgtatcgtaaacgaaggattcaaattaactgtaggtgttgatgcagtatggggtccaagtgctccagatgcatgggtaactcctaaggaaattaccgaatcacagacggcggaagccgatacaagtgccgatgacgcctatatggctctcgcagaggccatgaaaaaagcgttataaatattattatctaaacaacaggactacaaaatgcttaaagaacaactgattgccgaagcgcagaaaattgatgcttccgttgctcttgatagtattttcgaatcagttaatatttctccggaagcaaaagaaactttcggcactgtattcgaagctaccgtcaagcagcacgccgttaaattagctgaatctcatatcgctaaaattgctgaaaaagcagaagaagaagtagaaaaaaataaagaagaagccgaagaaaaagctgagaagaaaatcgctgagcaagcttctaaattcattgaccatcttgcaaaagaatggctcgctgaaaataaattagcagttgataaaggcatcaaagccgaactgtttgaatccatgcttggtggattaaaagagctctttgttgaacacaacgttgttgttccagaagaatcagttgatattgtagctgaaatggaagaagagctgcaagaacataaagaagaatcagctcgtctgttcgaagaactcaatatgcgcgacgcatatatcaattatgtgcagcgtgaagtggcattgagcgaaagtactaaagatctgactgagtctcaaaaagaaaaagtctctgctctggtcgaaggtatggattattcagatgcattctcaagtaaattgagtgccatcgtagaaatggtgaagaagtctaataaagatgaaagcactattactgatggtataaatactcctgatactgaagcagccggactgaatttcgtcactgaagctgtagaagataaagctgcacatggtgcagaagatattgtaagtgtatatgcgaaagtcgcatctcgtttctaattttaaaggttaacacaaatgactatcaaaactaaagctgaacttttgaacaaatggaagccattactggaaggtgaaggtttaccggaaattgctaatagcaaacaagcgattatcgctaaaatctttgaaaaccaggaaaaagatttccagacagctccggaatataaagacgaaaaaattgctcaggcattcggttctttcttaacagaagctgaaatcggtggtgaccacggttacaatgctaccaacatcgctgcaggtcagacttctggcgcagtaactcagattggcccagctgttatgggtatggtacgtcgtgctattcctaacctgattgctttcgatatttgtggtgttcagccgatgaacagcccgactggccaggtattcgcactgcgcgcagtatacggtaaagacccggtcgcttctggtgctaaagaagcattccacccaatgtatggtccagatgcaatgttctctggtcagggtgctgctaagaaattcgctgctttgaaagcaagtgatactcttgaagtcggaactatttacactcacttcttccaggaaactggtactgtatatctgcaagctacagaagttaaacaaatcgatgtcggtgctagtgatgcagctaaattagatgctgaaattaagaaacaaatggaagctggtgtactggtagaaatcgctgaaggtatggctacttctatcgctgaacttcaggaaggtttcaatggttctaccgataacccatggaatgaaatgggcttccgtatcgataagcaagttatcgaagctaaatctcgccagctgaaagctgcttactctattgaattagcacaagacctccgcgctgttcacggtatggatgctgatgctgaactgtctggtattctggctacagaaattatgctggaaatcaaccgtgaagttgttgattggattaactactcagctcaggttggtaaatctggtatgaccctgactccaggttctaaagctggtgtatttgacttccaggacccaatcgatattcgtggtgctcgctgggcgggtgaatcctttaaagctctgttgttccagattgacaaagaagcagttgaaattgctcgtcagaccggtcgtggtgaaggtaacttcattatcgcttcccgtaacgtagttaacgttctggcttcagttgataccggcatttcttatgctgcacagggtctggctaccggcttcaacactgatactaccaagtcagtatttgctggtgttctgggtggtaaataccgcgtatatatcgaccagtatgctaaacaggattatttcactgtaggttataaaggtccgaacgaaatggatgctggtatttactatgctccatatgtagctctgactccgctgcgtggttccgatccgaagaacttccaaccggtaatgggattcaaaactcgttacggtatcggtatcaacccatttgcagaatccgctgctcaggctccggcttctcgcatccagagcggtatgccttctattctgaatagccttggtaaaaacgcttactttagacgtgtatatgttaaaggtatctaatctttgacgatttaagggaccttcgggtccctttagttgtttttatggtataaataaatcatataaaccaaaaggaaagcgcaatggctaaaatcaacgaacttctgcgcgaatcaaccacaacgaatagcaactcaatcggtcgcccaaatctcgttgctttgactcgcgctaccactaaattaatatattctgacattgtagcaacgcaaagaactaatcaacctgttgctgctttttatggtatcaaataccttaacccagacaacgaatttacatttaaaactggtgctacttatgctggcgaagctggatatgtagaccgagaacaaatcacagaattaacagaagagtctaaattaactctcaataaaggcgatttattcaaatataataatatcgtttataaagtattagaagatacaccatttgctgatattgaagaaagcgacttagagctggctcttcagattgcaattgttcttttaaaggttcgtctattttctgacgcagcgtcaacaagcaaatttgaaagctctgatagtgaaattgcggatgctagattccagattaataaatggcaaaccgcggttaaatctcgtaaacttaaaactggcatcacagttgaattagcgcaagatttagaagcaaatggattcgatgctcctaatttcttggaagatttgcttgcaactgaaatggcagatgaaatcaataaagatattctgcaatctttgattacagtgtcaaaacgctataaagttacaggaattactgatagtggattcatcgatttgagttatgcgtctgcacctgaagctggtcgttcattataccgaatggtatgtgaaattgtttcgcatatccaaaaagaatcaacttatacagcaacgttctgtgttgcttctgctcgtgccgctgcgattcttgctgcatcaggttggttaaaacataaaccagaagatgacaaatatctttcacaaaatgcctacgggttattagctaatggtttaccgctttattgcgatactaacagcccattagattatgtaatcgttggtgtagtagaaaatatcggtgaaaaagaaattgttggatcaattttctatgctccgtatacagaaggtctcgacttagatgaccctgaacatgtaggcgcatttaaagttgttgttgatccagaaagcttacaaccgtctatcagtttattagttagatatgctttatcagcaaatccttataccgtagcaaaagatgaaaaagaagcaagagtaattgatggtggagacatggataaaatggcgggtcgttcagatttgtctgttttattaggtgttaaattaccaaaaattattattgatgaataaaacaaagggaccgaaaggtccctttttatttagctcaccaactcaatccaagctggacgaagtacatcttaccattttaactaattcctttttaatcaaagaaggattatctgcttgagttagagtaataccttcacgagaagtttcttccaaaatatcttgaacagttagccccatcacctttccaaaatcctttggaccaatttcgccaattttagaaataacgttatttacacggttcagtgtaacgtaacaagctaaaattcccaccaatttgttatcagcttctgatagttcaactttagctttaataggcttatcagactttttcttttcactaaatttggaattcttgcatttaattgctacacgatttccattatgaagccaagaaggataacaaggtttcaatacatatccttcagcagtaaatacttcgccttttgcttcggcattccaaacgcatttatttgcatcaactaatccagcatggtctactgtaaaattataatcttggacgacagaatctaaatcatttggcaatttaataagctcttcaaatttaccgcgacctaaaagtggagcaattttaaatttaaatgtattacagaatgattccatcatataatcatcaacataagtcacatcaccactttctgtagtgacaataatgtcaaatacataaaaatctttatcgccataatcaacattcttctgaatgccaggtccagcgaattcgccaaagacttgataagatacaaccgctgaggtttccataatatcttgtactgctttaatggaatcagcgtaattctttagaataatttcatacccaaagaaatcttcagcaggaagaatcggtccagtacgtttagcacaagttactttatcacgctcaataatcaatgagaaatttgtgccgtgaatcttttcacgagctacccattcgccgccagtcaatcccaagctgtaaagtttttcaataaatttagagttgtaatgattttcaagactgctactttttaaacataattaatcctcaaaatgtaatttctaaccaatcaccatcacgctgatcactattgactttaaaattaaatccttcttttctcagccaatcaccaatttcttcagtaatcaatttatcgcgagcagtataataactaaaatatgttttaccttgttcagctgctttattagcaagttccgaaaaatctttaataaaacactctagcttaaactgtttactttttaatgctttttcgcgtaattgattagcaaaagattcattttcataaagttcatactgttccatttttcacctttttattgatatgtctttttctatagacaactttttctcgagtttcaaatttattcttagcagtcatagctcgagcccataatacagccacttcttttgcatgtaagtttaattcacgagcaatttcaatgaatgactttccagactcatgaagagtaaacaccacaacctcagttctcatattcaatctcatgttatcgagttggtgccattatatacatcattttctgattgtgttttgtgtgctttcaaaatgaagaaaggggccgaagccccttatgattatggataggtatagatgataccagtttctaaagcagttttatgaatgatgtatccattacgcgattcttggacatcaacttctggatagtctttcatcatcttctgaagagtgtaacgatgcaggtagtatttactctggatcttcagttttccaatctttaccttcttcagtcattttttggatttcatccataacccaccaaccgcaccagatgtaagctgaagtacgatgtggaagaggatgaacataaggtaattcaccttctggttctggagcaactttatcagttacctgaacttgacctgttgttttaactgttttgctatcataatcagtagcagtaacgacggcagtcacttcaatagtttgacttccaacagatgaagtatcaacggtatatacattagttgacccttctacaggagaagaatctttcttccatgaataagtaatttgcgcttcttctggagcatcagtaacattagcagtaaatgtagccgaagcatcttgttgaacgttaatagaaggaggagtcaatgtaacctgtggattcattgtcttcttattaaccgttaatgacacttcattagaagtaacgcttagtgcatcataatctgtcgcggttacttgagctacacacttgattttttaactccacttgtagttggagtatagctaaatgtagagttagtttctccaccaacttgtgaatcatctacataccactgatacgtagcagatgctccatcaggttgagaagctaaggcagcagtaaattgaactggggttccgattactccagcgtcagggctattaggagttacagctaaggtggtcgtttgtgtcttattttgaactgtgatagttgtagtagcttctgctgtttcagcttcagcttctggaattgtatttgttgcaactactttaatagtcttttgaccggcaggtataactaaaagttgcttcagctccatcttgtggaacattatctacgctccaagcataggtaatagttccaccttcagtttgaccactgggtgcagcagtaaactgcttggtttcatcaataacccctgtcggtgttttaggagttatatcaactgtaaaagtcataagttatccttattttaatgttacgaaagaagaattgcgtgtttcacgaattaaaactgatccgtcgcggttaatgtaataaattaagctaaataaagtttggtgtgctgacgcatgttcaaaactagttgggtgagatttccaatccggagtttcagcaatccattgataaatccaccaaggaacagtgcagaatcctggattttttccaatcagctgaagattcggactaaagttttccggaagagtaaatacagacggcttttcagattcaataatctcagctacagcttgttcaaacttttcttcaacaaaaggagtatcttcaatcaaaacatcggtattttcaggaattttatccgtttctactacttcaattttaatgtcagatttaaccggagaatcaatcagaagtgctgcttctggattgacttcttcatcgtcatattttaatccctctgcggcatcagcagcatcaattaagtctttaatagataacccatcagtctctggcataggttcactagcgagcttctggagggcttcttcaatatcaacaacgatattatcaaaagatttattctttttgacctttataccaaactgttcagcatattcagctaatttagctttagcttctttgttatcatcaagagccttcagctctgcaatataatctttatctatcataatatttcctcagtataaatatagatatatttattacatggtatttagacatgactgacattaaagtacatttttatgattttagtcacgtgagaattgattgtgaagaaagtacatttcatgaactccgtgatttctttagctttgaagctgatgggtatcgttttaatccgaaatacaaatatggccactgggatggacgaatccgtcttttagattataatcgtcttcttccattcggcttagtcgggcaaattaaaaagttctgtgataattttggctataaagcctggattgacccacaaattaacgaaaaagaagaattatcaagaaaagattttgatgaatggctttctaaattagaaatctattcaggaaataaaagaatcgaaccacactggtatcaaaaagatgcagtgttcgaaggattagttaatcgtcgtagaattcttaatcttccaacatctgcaggtaaatctttaattcaagctttgcttgcgcgatattatttggaaaattatgaaggtaaaattcttatcattgttccaacaactgctttaacaactcagatggctgatgactttgttgactatcgtttattcagtcatgcaatgataaagaaaattggtggcggagcatcaaaagatgataaatataaaaatgatgcaccagtcgttgttggtacatggcaaactgtagttaaacaaccgaaagaatggttctcacagtttggaatgatgatgaatgatgaatgccatcttgctacaggaaaaagtatttcatctatcatatcaggtttaaataactgcatgttcaaattcggtttgtctggttcattacgtgatggcaaagctaatatcatgcagtatgttggaatgtttggtgaaatatttaagccagtaacgacttctaaattaatggaagatggacaagtaactgagctaaaaattaatagtatttttcttcgctatccagatgagttcactactaaattaaagggaaaaacttaccaagaagaaataaaaattattactgggctcagtaaaagaaataaatggatcgctaaattagctattaagcttgcgcaaaaagatgaaaacgcttttgtcatgtttaaacatgtatcgcatggtaaagctattttcgatttaattaaaaatgaatacgataaagtttattacgtatcaggggaagttgataccgaaacccgcaatataatgaaaaccttagctgaaaatggtaaaggaataattatagtagctagttatggtgtattttctactggtatttcagttaaaaatctgcatcacgttgttttagcgcacggtgttaaatcaaaaatcattgtattacaaacaatcggtcgtgtattacgtaagcatggttctaagacaatagcaaccgtctgggacctcatagatgattgtggtgttaagccaaaatctgctaatacgaaaaagaaatatgttcatttgaactatcttttaaaacacggcattgatcgtattcagcgctacgcagatgaaaaatttaattacgtaatgaaaacagttaatttataagggcttcggccctttggagaaaaagatgttactaggatttaaacaatttctttatgaagcttctattgatgaatttatgggtaaaattgcctcttgtcaaacattagaaggtttagaagaacttgaagcttattataagaaaagagtcaaagaaactgaattaaaagatactgatgacatctctgtaagagatgctttggcaggaaaaagagctgaattagaagattcagacgatgaagtagaagaaagcttttaaattaaaaaaggcccaaccaaaaaggaagggccaaaactatagactaaaggtcacactatagcaaaagttgtgtttcatttaattgttcttccgaactttctgaaactggtagttctttaatgtaattatagcaaggcccaggatgtacaggacctttgtctgtttcaacaaccaatgcagaatcgattggagttttacagacaacacaaatcttatctgacatgattgtctcctctgaattatatctatttatacaactctcatatgcatatcaatgcccatatctttagaataaaaatattcatcaagatatccggcaaattttcctttaatataaaggacatcttcaccacacgggtgatcggccaggatacgaatatcctgacgcttaagattatgctttttcattaagaattgaatctcagtttcaaattcttcttcataattaaaagcatcatcaatgctatatctcattattttccagcctcaaatgcccgcatgtcttgaatatgcttaatagcaaatccgcgtgatttgatagcatcaagagctccgctacagaaatctaataaaatcccccaatactgtaacgaggtatcaacctttaaaacatccttatccgctgatagaactgtcttcatttctgatttctcgtaacgatccatactaaattcatcaccatctcctcgtcccgagtagtagtctaatttagctttaagagcaacttttttctgtgcgtcaattctaagcatttcctttttaatacttgaatgcttattaagccatttactgtataacatcacattattagctgcttcatactgtaatttagttgaatctataaacacatctttcttcaattcttcttgaagatcttctaatctcatattgttctctattcaattgttattggatggacttagattcattataccacgttttaacgtgaagcattataccctattactcgaagccagttgcagttttatctgctcaatatcatcagggttatcgatgaccgaaaagcgtatttctactatcagagtataatcatcataaactggtatcacattaactgataatttatcaatacgtggctcatagtttcttactgcgctttcgatattgcgctcaaccgtgtcagcagtaagaggagtcatattttcaaaaagctgatctgataaatcacatccaaattcagggtcaaacggtcttgaaccttttcttgttgtaataattcccaaaagactgtttttaattgaccttaatccaagtgatctggaaacatctttgttccaatccattttcatttccgggtcaatgtcagaataaagcttattaatatttgccattatagtaactcaaagaactctttgaggcctcttattacatgagcatgggtttttccacactctggacatttaattggaacagccaaataaacggtaggctttaaaagcatatcttttatagctacaatatctgactctgtgatgatagaatataaatcttctagttctttttcatttaagtcttcaactggaatgctttcaccgttagcatgaatcgtttctatgcatgatactatcatgtgggctatatttttatcatcaaaaattttagggtatcggaatttaattttaatgtcacccagtgtataccagaggtcttctggtgcatctatttgtgtatgtaatagatttatatgggttggtatttcagttccacaggtgcacttccaggagttttcgtgattaacttctccaagagaatgcgcccataaatgaatcagcaatagttctgattcttggcggtttaaatcttttgcatttgtgcagtctttgattagctttttaacaattacttctacggaaccattatttttggcagtaataagttctagatattctttaagcgtgaatgcgcgacaattgattattttagaaccaactctcacatcaaatttgtattcatacatatttagctcctttatttatcatatttataaatagaataaaaggagcatctatggcaaacattattcgttgtaaattaccagatggtgttcatcgttttaaaccatttacggtagaagattatcgagattttttgttagttcgaaacgatatagaacatcggtcaccacaagaacaaaaagaaataattactgatttaattgatgattattttggagactatccgaagacttggcaaccatttatatttttgcaggtatttgtagggtcaataggtaaaactaaagtaccggtcacatttgtatgtccaaaatgtaaaaaagaaaagacagttccatttgaaatatatcaaaaagaattaaaggaacctgtttttgatgtagctaatgttaaaattaaattaaagtttccttctgagttttatgaaaataaagcaaagatgattactgaaaatattcattctgttcaagtagatgaaatatggtatgattggaaggaaattagtgaatcaagccaaatagaacttgttgatgccatcgagatagaaacattagaaaaaattctcgatgcaatgaatcctattaatttaactctacatatgtcatgctgtaataagtacattaaaaaatacactgatatagtagacgtgtttaagctgttagttaacccagatgagatatttactttttatcaaattaatcacacactcgtaaaaagtaattatagcttaaattcaataatgaaaatgattcctgccgagcgcggattcgtattaaaactgattgagaaggataaacaataatgagtatgttgcaacgccccggatatccaaatctcagcgttaaattatttgatagctacgacgcttggagtaataatagatttgttgaattagctgctactattaccacattaactatgcgggattctctttatggacgaaatgaaggaatgctgcagttttatgattctaaaaacatccatacaaaaatggatggaaatgaaataattcagatttctgtagctaatgcaaatgatattaataatgttaaaacacgaatttatggatgtaagcatttttccgtgtcagtagattcaaaaggtgataacatcattgctattgaattgggaactattcattctatagaaaatcttaaatttggtagacaatttttccctgatgcaggtgaatctataaaagaaatgcttggtgtcatttatcaggatcgcacattattaactccagcaataaatgctataaatgcttatgttcctgatattccatggactagcacatttgaaaactatttgtcatatgtaagagaagttgctctagctgtaggaagcgacaaatttgtatttgtatggcaagacatcatgggagttaacatgatggactatgatatgatgataaatcaagaaccatatccaatgattgtcggtgagccatctttaataggtcaattcatccaagaattaaaatatccattagcatatgatttcgtttggttgactaaatcgaatccttacaaacgtgatccaatgaaaaatgctactatctatgctcattcatttttagattcttcactgccaatgattactacaggaaagggtgaaaactctattgtagtgtcaagatcaggtgcttattctgaaatgacttataggaatggatatgaagaagctattcgtcttcaaactatggcacaatatgacggttatgctaaatgttctactgtcggtaattttaacttgactcctggtgttaaaattatttttaatgatagtaaaaaccaatttaaaacagaattttacgttgatgaagttatccatgaattatccaataataattcagtaactcatctatatatgttcactaatgcaacgaaactggaaacaatagacccagttaaggttaaaaatgaatttaaatctgatactaccactgaagaaagtagttcttccaataagcaataaagaagtttctattcctaaaatgggtcttaaacattataacattttaaaggatgttaaaggtcctgatgaaaatttaaaacttcttattgattctatttgtccgaatttatcaccggcagaagttgatttcgtttctattcatttattggaatttaatggaaagattaaatctcgtaaagaaatagatggctatacttatgacattaatgatgtttatgtatgccaaagattagaatttcaataccaaggaaatacattttattttagacctcctggaaaatttgaacaatttttaacggtgagcgatatgttatctaaatgcttgcttaaggtcaacgatgaagttaaagaaattaattttcttgagatgccagcattcgttttaaaatgggcaaatgatatttttacaactttagcaattcctggccctaatggtccaataaccggaattggcaatattattggattatttgaatgaaaaagccacaagaaatgcaaacgatgcgtagaaaagttatttcagataataaaccaacacaggaagcggctaaatccgcttctaacactttatctggacttaatgatatatctacgaaattggatgatgctcaagctgcttctgaattaatagctcaaactgtcgaagaaaaatcgaatgaaatagttggagcaattggtaacgtagaaaacgcagtgagtgatactactgccggttctgagttaattgctgaaactgtcgaaattggcaacaatattaataaagaaatcggtgaatcactcggaagcaaattagataaattaacaagtttactagagcaaaaaattcagacagctggaattcaacagactggaactagtttagccacagttgaaagcgctattcctgttaaagtcgttgaggatgatactgctgaatctgtgggtcctttattaccggctcccgaagcagttaataatgatcctgacgctgattttttccctacccctcagccagttgaacccaaacaagaatcgccagaagaaaaacagaaaaaagaagcatttaacttaaaattatctcaagctttagataaattaacaaagactgttgattttggatttaagaaatccatttcaattagtgataaaatatcaagcatgttatttaagtacaccatcagtgctgctattgaagctgctaaaatgactgcaatgatattggctgttgttgttggaatagacctgttgatggttcactttaaatattggtcagataaattttcaaaagcctgggatttatttaatactgactttactaaattctctagcgaaaccggaacttggggtcctttattacagagcatctttgattctattgataaaattaaacaactttgggaagcgggagattggggtggattgacagtagctattgttgaagggcttggaaaggttctttataatttaggagaacttattcagcttggaatggctaaattatctgcggcaattcttcgagtcattcctggcatgaaggatactgctgatgaagtagaaggaagagcactagaaaatttccaaaattctactggagcatctctcaataaagaagaccaagaaaaagtagcaaattatcaagataaacgaatgaatggagaccttggcccaatagcagaaggactagacaaaatctctaactggaaaactcgtgcatctaactggattcgtggtgtagataataaagaagcactgactactgacgaagaacgtgcagcagaagaagaaaaattaaagcagctttcacctgaagaaagaaaaaatgctttaatgaaggccaatgaagctcgtgccgcgatgattcgttttgaaaaatatgctgattcagctgatatgagtaaagactcaacggttaaatcagttgaagctgcctatgaagaccttaaacagcggatggatgacccggatttaaataattcgccggcagttaaaaaagaacttgcttctagatttgctaaaattgatgctacttatcaagagctcaagaaaaatcagcctaatgccaaacctgaaacttctgctaaatcaccagaagcgaaacaggtccaggttattgaaaagaacaaagcacaacaagctcctgttcaacaagcatctccttcaatcaataatactaataatgttattaagaaaaatactgtcgttcataatatgacacctgttacgagcacaactgctcctggtgtatttggcgcgactggagttaattaaggaataatatggcaattgttaaagaaataactgctgatttaattaaaaagtccggtgagacaatttcagccggacagagcactaaatcagaagtaggaattaaaacatacacagcccagtttccaactgggcgtgctagtggtaatgacactacaggggacttccaggtaacagatctatataagaatggattattatttactgcatacaatatgtcatctagggattctggaagtcttagatcgatgagatctaactactcttcttcatcttcgagtattttacgtacagccagaaacactattagtagtacagtatcaaaactatcaaatggattaatatcaaataataattcaggaacaataagtaaagctcctgtcgcaaacattcttttaccgagatctaaatctgatgttgatacatcatcacatagatttaatgatgttcaagaaagccttatcagtagaggcggaggtactgctactggagtgctaagtaatattgcttcaaccgcagtatttggggcgttggaaagtataacacaaggtataatggctgataataatgaacagatttatacgacagccagaagtatgtatggtggtgctgaaaatagaactaaagtgtttacatgggatttaactccacgttcaacagaagatttaatggctattattaatatctatcaatattttaactatttttcttatggtgaaacgggtaaatctcaatatgctgctgaaataaaggggtatttagatgattggtatcgttctacgttaattgaacctttatctccggaagacgcagctaaaaataaaacactatttgagaaaatgacatcgagtttaactaacgttctagtagtttcaaacccgacggtttggatggtgaaaaactttggtgcaacatctaagtttgatggaaaaacggaaatatttggtccatgccaaatacagagcatcagatttgataaaacacctaacggtaactttaacggattagctattgctccaaatctccctagtacatttactctcgagattactatgagagaaattatcacgttaaaccgtgcttctttatatgcggggactttttaatgtattctttagaggaatttaataatcaagcaataaacgcagatttccaacgtaataatatgtttagctgcgtttttgcaacaactccatcaactaaaagctcttcgttgataagttcaattagcaacttttcttataataacttgggcctaaattcagattggttaggattaactcaaggtgatattaatcagggaattacaacgctaattacagctggcacacaaaaactaataagaaaatcgggggttagtaaatatcttattggtgccatgagtcaacgtacagttcaaagtttattaggctcatttacagttggtacatatttaattgacttctttaacatggcatataactcatctggattgatgatatactctgtaaaaatgccagagaatagattatcctatgaaactgattggaactacaactctcctaatattcgtataactgggagagaattagaccctttggttatttcatttagaatggattcagaatcgtgtaattaccgtgcaatgcaagactgggttaatgctgttcaagacccagtaactggattacgtgctctgccacaagatgtcgaggcagatatccaggttaatcttcattctcgtaatggattgcctcatactgcggtgatgttcaccggatgtattccagtgtcagtgagcgctcctgagttatcatatgatggagataaccaaataactacatttgatgttacttttgcgtatagagtcatgcaggctggagcagttgataggcaagctgcgcttgaatggcttgaatctgctgctataaatggtattcaaagctcttctggaaataatggaggtgttactgaactatctagttcgctttcacgacttagtagattaggaggaactgcaggaagcatttcaaacattaatactatgacagggattgtcaattcgcagagtaaaatattaggagcaatataacaatggggacctttcggtccccatatttttatttacggaatgaaatgaaagcagaaactgaagcaactaaactgtcttcaatataaacttcaatttttaccggagcttctgactcaaatttacctgttactacaccctggaaaatgctttcagtctgttctggctttgaaaaattttcagaaggaaaaattccgaactttttatctgttccaaaaattttaataaattcatcgtaaaccgcttcgttaaaagcattatcagcaggaataacgccttcaactacaagttcttgacctaaaaagcgcaaagaagatttcattttgtgttcctcatgttatgtcagtaagattattataacacaacataaggaacttgtaaactacattttgaactttttagacattccgttgatgttaaccaaagaagctaatatttgagaaacttcgttttcctcttcttttgattcttctacaaggaattgattaaatccagccattggacgaacttcaccagtttccattaaatggtctccatcatatactgattcttctaattgttcagaaggaggaacgattgtaccttcgattagatacttgttataagcagtttctttcataaagtacgtacttactttattaatcttcagtaaaattccacgcggtagaataacttcagcttctgatggaaatcctgataaatgacctggaacgataactttgattcgctcagctcctttaattaccatacccacgctagtttcagcatcttcattagcatatgtagaatgactacccatatgcatcaaatcttctgcatcaacggaaccttctccttctccagaaaatactgcaccggaatcatctagagccatatagtttttaccatgctcgccaaagatatttggtttaagtgatgtcgatacgaagttcttgaaatagaacattttgttttcaatgttgtgacgcaaagttttaaaggtaacttcttgtccgcgataaagcgtagttcctggaggaagaactgaacctttagcgaatgcagaatccaacgtctcgatgtgcttaatagcacgttccatatattcttcacgggtagaatctggtttacccaaaaggaacgagttcatttcaacatatgaatctgcacaataatcttcaattacatcagactcagcctgagtcagtccttttggagttacttcagtgcttgcatattcatatgcctgggcagcagattcattaatcaatttataaatgccattcatgacaaattgaataataactgtcttttcatctggcgtagctttagaacctttaaccaaatcattgataattttcttaataacatcaaagctattagaaatattaatatcagcaagatcacttaaaattttatcagttttataatcaaagaattctttattctttaaatattcttgagaaccttgatatgttatatcgctctgtaacttgatagatggatcacgtaaacgtgcatgggctaatgcaatatgatttcggaagttttctagttcataatcgctagatttaaaacgagaagcacttctcataccaccgatagctcctttgctgaagtttgaaccaatctgaataacgccagagttcattggtccttctgctttatataccggaactttagattcaaactcttgatatttcttggcagcgaagctatcaccctgaagtgaagcatcgacagtagaatattgagcttgtgctgctaatcgacgactaattttagttttctgaataaccgcttggtcagtacgtttatcattttctaaagcaatagaagcagcaacagcgacagctttaggaacagcatcacctgttttaacatctacataaacatcaccgaccttcgattcaacttttgcgaataactcagttgaaataggaggtacacctggaatgtcttctaaattggcatttttacggtaaaccataatatatgcatactttttatcatagtcccagatttcctttaaaagaacatatcgacctgctcctttagtacgtactaaacggtcagcaataacttgcatttgacgagctgcgccatttgttttactttttagtacgcggaataagcatgcgtcgattttatactgtttcattgtttgaagagcagtatcaaaaacagcattaatgacgccaattggatttccacccaagtttctaagcttaaccagcgataatttctcgttgacacctatcattacgatatgcatcattttatcgcctggcttaacgtttttatttgtatcaccaccagaggtgtatgtacaaaatctaaatccaggaagcacgctttcttcgccggcttgaatagcaaaaatttgtggtattttatgcttaggatttaagttaacaaccggcgccgaagcgccgtcaaataattctgtaataagttccatgatttatccttgaacgaacttgtaaggcatgtttgtaatatctatgcaagacgcaataattccgagagatgattctactttctgtttaacatttgatgaaacaaatgatgcaaagtcaactctgtcttctatttcaatatcacctgtcattgcaactacttcgccggtttccattaaacggtctccgtcatagattaccgattcggtgagttcttctgtggtcataacttcagcttgaatgagttttgtattattagacgtggttccgtcattattagaagcatcagttattttattaactttgaccatcaatccgcgcggtagaataacttcagcttctgttgctattccgagacttcctggatatacaacattaactttatgagctccatcaattgcccatcctatttgaactttaacgtattcaggattttctttatacgctcttatttcgtttggattaatagttattccttcttcatttttatcaactgttaattcattgcgagcttctggttctaaaagaccaataccagcatgtgtaattccaaaacgtccaaaaatgataggagttaaagaagtagatacaaaatttctgaaatagaacactttatttttaactagcgcttcgtatataggagcagtcatactttgagcacgataaactgtaatgccttccggtatgcggtcaccattttcaaaagctgaatctaaattatttatagcagattcaatttctttttcactcattacatcatatcgttctggattgtaacgacctaaaagaagattattaatgtctgtatatcctgaaccacaatactctctaataccgcgcttttgtgatggtgtatatttagaaccatcacaagcaatagtaatatcaatcattggaccagcaccaattccagaaaaactataaatcattcgtttgaggaatttagtttttgctgcattccaggcatttttagttatttctccccagacttcatctggctgccctttacgagttttattatgtttatcaagccaattatctttatattcttcaaagaattgattgacagctgccgcgtatttctctaaacattttattgaagtagttggttcatttttaatcgcgttaaaaattacatctttaattttttcagaaacttcatcaacctcactttttgaaaagaatttatagtcatagtgaagttcattcgcagttccttcggcaataatttttgctgcctttgttttagaagctaatgaattaattccaattttcatttcttctgcttcgggaattaaaggagcggtagcaggcttattgaaattagctgcggtagattcatacttctggaataattcactttcaaatctagaagattccaatgattgactttgcgcaattgctctacgggaaattttaactttaacgattacagcttggtcagtacgtttatcattttcttgtgcaatagatgctgcaattgcctcgtttttagttacttgagctccagtatctttattgatataaacatcaccgaccttcgattcaactttagtaaagagctcggtactaatttccggaactcctggaatgtcttctagtgatacatttttgcgatgtataagaatatatgcatactttttatcataatcccagagttccttaagaaggacgtatctgccacctgaacgactacggataagtctatcagcaataacttgaatttgtcgagcttgaccagcagttttagacttaagaatacgaagcatacaagcatcaattttatactgacgcattgtttgcattgcaacagtaaaaactgaattgatataattaattgggcttggaccaagaccttttaatttagcaattgaacctttagcagttaatgtaaaaggaacaatatgcatcattttatcgcccatttttaaatcgcgattagtatcacctccagatgtataggtacataaacgaaagcctggttgttcaattgcatcatcaacatgaactgaaaaaatttgtggtattttcttctttggatttaagtttgtaatcggaagagtagtatcttcgtcaaataattctgtaatgagttccatcatatcctctctagtgtttattctatttataaaattaaaggcccgaaggcctttaataatctataggtaagagagtacgatatatttcaaactttggacctttttcataagcatcaaaagtttctgtgaatttattataagcatatgcatctataaattcaatcatgatttgtgatacagaagtagaaacatctccaccttctttttgagctacaacaattgtttctaagtaagctttcatagaccagttacctcatgaaaatcgccaaatacatcttcgaacgtattagctttagttttatcttcgcgtaaacgaatcgcaatcggaagaaataatttaacgtaatcagtgcggccatcagattttaaccaaccgttgcattcgcactctagaatttttccaatataataattttggttttccataatgcgagtacggtcaagttcatgcgattttacaccggctttatcttttaagcctgaaccagcatttaccttaatttttccgcactctgactcaagaataaatccacctgctttagtagggtctttacggtgaggataaattcctacaatttttaaatcaacatcaattacttctttaaatttatagagattttttgaacgagcattttcccataatccatcgatatttttgagaataataccttcaagaccttggtcaatatactttttataaattaccttagcttcatctaggttatttactacctggttttcaattaaaattactttatcatatcccgatgtcatttgttctagtttagaaaaacgtacatcatacttcaaacgaaatgcaggaagaccgtatatttctaccaacgggacataatcccagacctgaaacttcatgcattgagcttctttttcagaaatggttccctttaaagatttattggcgatgccattagatgcagtacgtgattcagctacttctgtgaagtctttaactttactgttttcaggatgagcatcaaaaagaaaatctaggccttctggctcctttttaacttgctcatggtataccaattcgccatcaattaacacgccttctggatgaatctggcgggcttcagcggtcattttgattaattcttccttaagaagatctaatcctagatattcattaccggctcgtgataaaagacgaacatcatctaattcatcacctctgacttcggcaaagcaccgagccccatcagcttttaactgggcaaaagctggaaatttgatattcttattaatgcctttttcatcataagaacttgcaagcatttgaggttgttcaggaattaaacctggccaaactttgtttgcaatagatactgaagcaccacattcaaggtctcgcatcatcactcgacgcaaaacttcaacatcatcttttttaccatcggtgatatatccagttaattcctcaattgctgcatttccagtcaatttccgagtagctaatgtgaattcaatgaagtcaagcatatcgataagagtcaacattccaaaactctgggtagcaataccaggtttaggccatttcttgatataatactgcaacccacgagaataagtcagacgatatactcgtttaagcaattcattatctttattcttttcaagaattgcttgcttctgcttagttgaaccaatagatgctatttcgttcagaattttaagaatcattattcatccttcagagtttggtttacagctctattataaatcaattcatcattaagctcagtcaaagacctatgatatgtggttctaactttatttccttgcatccagtgcttgacgtaaatgaaaccttgctctacacattttttaaaaattcgttcgtctttttgagctcggaattctggattgcatctaaaaaattgatttacgtgaccgtaatcacgtgtagtattaccttcattttcataaatagtgtgaacaacaaacattagaatgctccttggaaaatattatcaccactaccactagtaagtctattaaaataccctgcgtcgccaggcttaaaactccatgtatggaatggatgcatctggtgtgagtgtgtataatatggattataaggattaaatccaggagttctccaggtagtgttccaaggaaaagaatcgtttttaatcatcttctcgattgtatcttttatggctttttcactatcaaaactttctttattttccttcggcgaaaaaagcttattttctacatcattccatgtataaacccgctgagcagtttttggaatattgtcacgctctcctcgagccatccaataaacaggaacacgtaatatttcactcgcatggtcgcagtggtgagcgagatcgtcaatataacaaattacgttatatttctcttttgcctttttgaacagctcttcttttgaagaatcatgaccacacatcaatacttctgagaaggcaccaggaaaaagagcattcaaattaaattgacgattcagcagagcgtcaatagaatcgcccaatgctgtaacagctacaaaattataatcttcctttaatttgttaattacacacagagcatctttatatggagacaagtaacgaataaaatctgaacgattgtatttttcaattaacttgacaccaagttcttcatcacagttaaagagtttaccaggtgaaataaatttctcatcttggatcatttttaaaatatgttctaacggaagattatatttctgagcaaaataaggaaggcctgattgccagcttaaacatactccatcaatatcagttaaaatagtaggcttcatagagagtctcttaataggtttaacacatcaataaattcagcttcggttagtattgtatcatcttttgttagaccactagccatgctgtgcttcaaaacttttcctttcgaggctagtaatgcatcacgaaagcccttgttttgaatcgctgcttcaaaatatgcatttgtatataattctttccacgctggggagtatcttgaaaacggaactccgagccagaagagggtcccacggtcctgagctctagcataagaccttccagcttgttgggcggcaagcccggataacccaaatatacgacgttgttgttcaacatttttcaccttgcatccttggaggaatccttcaagacctccgaattgaataccatccatgacgaaaggccattgggcgaaattacttaatgcgcatgatggccatctaaaattgcttctaatctctaactcagacatctttaatactttataatttcaacatccgcccaatgaccataacttggcagacggtcttcaatagataatccaccatcatatttaagcattttaattgtcataatatggctctaaatggtcttctgtgagcgtagaaacgtcagtcacacgataagtaacttcaaccatttccgtacctaataatttctgaattaatttcttaaacatattatcagaacctcatctgaaaaccgtgtgatttaacattaccgccgccaatatcagaaatattaatttcacgcgcaattgaagggtcaatgtcaatttcgcgattgagtttagtgatagctaaagtatcacgcccatttactgtacggaattctaaagggcagactacattaacgtaatttttaatcgattcactggtaggttgcaaatgagcaggaaggtctttaggcgccttagagaaaaccacttcacaaaaatttttgcgggtatcaaaataagtagtcataaacataacattttcctcaataggggccaaagcccctcatttattttaaatatcaaattcgttaagaactacatcaaagattgcttcaagatgctcaggtttagctctgttactcagaatatgacgaatccaagttttaaccaaaagcttgcgattagcaccattccagcaaggatgagtccctaaatcgcgttgacgaaaatcatcatccagagcgattttaaagttggaaccttccattgtgattgaaaccgtgatgccattttcaaatcgcatataaacatagttaggagtcatatactgttcaatttcgcatactgatccattttgatgtttccaaaggcagatagtatcaatagaacctgcaataccattagaaacatatttacgttcaaagttgatgtagttcatttttattctcctttgtttgtgtaagataatactatcacaaaggaaccatactgtaaacaactttatgcaatctttggaaaataaaaaaggactcccgaaggagtcctcaacttatgctttctgcttaccaaaacgagaagcatcatctcgaagaaccgcacgtgctcggcgcatgatcttctcaacagtttgattgatacgagagttcgacccacgcttgtagccagcgcgtttagaatcaccaactttcttttcaactgctttctttgctttagcttgttttgccattataaattctcttttaaacgaaaatgcaggacttattggcattgcctgcgaaagccctcaaaggggtacttaggttttgaatatttaccgacaggataaccataaacccgtcatcataccaccaagacttacacagataacacttttctgacgcatgatagtaacattcaagaggtacaccgtaaaactgccggggtcttaaaactataatgattcgcaaatcattaatcagacagttcgacggctcctcgattttagctcacactaaggcagtgaatctccaataaattacttcaatgttaccacaaagtgacgaactgcttttcgcgcggcagaagccagaggcttagcatatttaagttcatctttttcctgaagctcggcagctaatgcagtttgagcaggattcagatgtttgaaataacgcaggatttcaagagcttcggcttcaacatcaatagatgcgccatagttttcgtgaccattattccatgcgtttcgttgcagttcaagagcgtgttgtaattgtttaatcatttaaaaattctcgttagagattaaaactcggtagtcacgttcttctgaatttcatcttctttcgacagatctctcagttgtagactaccacatagaattgttcggttaacttattattccgacacccaattcatattatttatatcacttataaagacacggaatagctttataatgacaggtaacgaatttttgtttaatttcttttggctgcttaagacccagagctacaaaaggatgcggaacgtttcgaatttgaccaactggaagagaagtcaaatcaccaacttcacaaaaaccttcaggaacatcaggaccgacagagtgaattacacacagttcaggaacttcaccttgaacacgtttaccgataataagtcctgattctgtaacttcttcatcgccggcttgtgcaggttcagaaactaaaataacatattcaccgacagcacgaattggtagctgttgtacttcagacatcgtttttcctttttgctaacagatgaattaataataacaaataattcttaaagcatttatttaccaataaattgaagcaaatgctcaactttcataccattaacagaaatcaatttgtcaatagaaaaacctcgccaagcgccaagttcaacatcaaatactggaatcatatccgtagattctttccgagtagattcagtcaatttaccggtttgcatggttggcataaagtctgcatcacgagtacctttcatagtacgaatagtaccatcagacttttcaaaaactacgtttgaaacacccatggacaatttagttttcaaaatttcacgaattgctactttctgctcagttgtcagtttcatttatttacctattacagttttaatatgagttgttccacgttctttaagggtggaaagtaatttttggaatttttctaaatcagatttccaactatatggtttatcaatacaaacccaatttgtcttataatactgtttccatttagagaaaaaatatttcttatactctacagcaaacgagatgttctcattagaataagaactaattgctgtgagctttaccaaacgaaatttcattattcaccgcagaattcgttgatattttcccagtttaacttattcaagtttttcttaggaacattaaacacttcaatacctgcatttcgcagaatatcatcccagccaggtttatttttatcatatgtttcgcaataaaccagctttttaataccagattgagctatcgcttttgcacaatctggacaaggagaaagtgttacatacatagtagcaccttcaatagaagaaccatttcgtgcagcaaacaaaattgcatttagctcagcatgaatttcatttttagacgaccattcagagtgagcactacgatgttctttcgccaagacaaaacgatcagttgaaccaaatgatacgcattcaggcttatggccttgaatgatagtatgtttaggcttattcagcaaccaaccttgctcagcagcataatcacaacagttcacaccccctgcgggtgaaccattatacccagtagaaataatacgtccattcttttcaattactgctcctaccttccaggagcaacattttgattcctgcgatactaaatatgcaatttgaagtactgtactcgctttcatttcataatcaccagataagcagatttagcagtttcaacacgataaatttcgtgacgaagtttagttatacttttaataacagaactaattatattctgcccatctttaaagcggtttttcttatcaataaaaactgcgccagtcatctttttatgaagctcaactggatacttcgtcacaataatagcatcatacacagaaggatgaatactattcaccagagtatcattcattaaagttattctaatgaactttgctgtttcagagtcaagcgctctatgatcgccagtatcattttcaagacaattatcaattatatcagttaaattcatcatagtacgccatacaccctttgtgcttcaactaatccatcaaaatccagtttaagatgcgatatttgatcgccatcacctggattcacaattactaatactgaacgaggagtttcggtaataacacgaaccgatgtttcaggaaatcgttcagaaaccttatttaccaattcctgcgcaaatagcttaactttttcttggaattctttaacagtaatcggtttttcacttagcagcattttgttttcctcatttgtttggtagagctaatatcacaactctaccgtaaagtaaactattaaattgctttgaattctgctgtctgcgattcaaaacgaatatcgcctttgatgactagctcagcatcaagaccgaatacaacaatgatatgcgcggaacctggatacagcgtaatggcaacagaatccacctggtctggaagcaaagtgttcaatacatgagtcacttgagcatggattcgaagctcggctgcgttatcaagtttttcaaacatattattagcgataatttggctaaacactacttctacgattttagaataagtaggaaacatatttacctcacataattttcttcaagccaattaataatatcccaagtttcatggtgcaaagccattaaaaatctcccgaggcgacttgccagcattcaacaccgatgcggcgccacatttcaactacttgagttcggtcatcaatagctaatttcacatcaaaatgtggtgcaatgtgtttccagaaaatttcttctttaaccacatcgtctttacgggtatcgccttgttcgcgctgacattgcataactaatggaacgccagcaatgtcctcaacccatttacgggtcatacgataatatttcgttgggtcttctttagttccactttcacggcctgaaacgactacaatgtaatatccttgcttatcgtacatcttagctagttcaacgaccattggattaataatatcggtatcgcatttttcaaggtcataaggaccacgaccattcatttttgctaatgtgccatcaacatcaaaaataactgcttttggtttaccaggagtcccattatatactggaagaccgagatattcccgcatgcttttatacattgagcgtaaaacatcaattggtactgctttagttccgcgttttgagttacgtttaaccaattcagtccaaggaacatcaaacactttatattcaatttgatgcccaagctctttggcaaactcttcccagaccttacgtcgttcaggatttagattagtatctgaaacaattacacccttcgttacgtcttggcatagaatcatgttagcaacatcatgctgcatgtaagttacgatgccttctttctttttggtatacttgtactcatcgcgttcttcatgcgccataatagattggcgatagtcatcacgattgatattataaaacccgggattcttagcaataaattcacgagcccaagtactcttaccagaaccaggacagccaatagtcaaaataatctttttcatcatttaattcctaagaaaacttcaagaatacgaatattgtgctcacgccgtcctttgtacaattcagctgttgattgattcactgatttactctgaacattggatgaaataaattttatcatgtgatttttaagctgatacatatcaagcccacgagctttcgcttcttttcgcagggctttaccagcatcatctaaagctttagcagggtcttcatcatttaatactattccacgatccaaatccatgtatactgcaccatgacatgcatcaatgtaacggtctgagcattcaatatagcattagcagagttttcatttatttttctcaaccaatgattgaatataatcatgcaggtctttagatgctttgccccacttattttgatattcatttttgagattagcacgtgattgagctaacaaaacatcattagtcggaggtaaagattctaaccgctgaatctggcgtccataaatcattgcagccatctcggattcataaatcaattctttgagatgttcaaattgatgccatgaaatcatttacatttatcctcttttaactcttgacgataataacatatcatagttttctggtcatgtacatatcgttttacatcattaagccaaatacgaaattcctgggaatcttcaaatggcataccgacccaagctttaccatcgataactttaacttgccaagatagtttagcttcatcatatgactttatttgtacaggccaattaggatgaactgtttctttctttacttctagaggctttgtcgaacaaccaactagaagaccaatagataatattactgctgatagtttaatcatttagaaaggtcctggatgtcttctgcgaacttgttgaaggagttgttgatttgtttttcaaccaatcctggcttatgagccaccacatccgccttctttgcgtctttgcgcagtttttcattttcacgctcaatagcagaaattgcctcacgatttttagtattcatcgcatcaatataattatactgaattcgcaaattatttaatgctaaagcgttttcattggccgtttttgtaatttctacaacagacgtttctaatctttcaattttattttttaaaattaaagaagttccgcctaatgcaattacaattaatagcaaacctgctgtcgtattacttaattgcataaagttttaataacctctataatatcgtcttgagaaagaccgttaattaaaatatgatgttcagctggagatttagaaattttaaagcatgcctcaacatcttctgccatatccgatgcactacgatttggattactaatcccaaggcggtgttttcccgtcaaaggattaacgatgatgtagcatttacaactattgatatgaacattaggctgagtctgattaatgaatacttcgcactcatacttagcgagttgattttctaaaaagactttcatctcttcaaccgcatcaggaagcatatcacgggcttgctcaagacgacgatttcgatattctttaatggtcgttttccgcttgacttgcttagctaaatctttcttaagatcagtgatatatccaactcgacgatttcctttgaatacagaaatcccatctgtagtatcaccgtatgcttcaacgaccatttcagtagtaataagctgcaaatccatcataaagtcctcatgttatgtcagtaagattactataacacaacacgaaggacttgtaaacagcttagtatccttccgggataaattttttataatttttcaaaaaattctgttcgatttcacacatgaccttttcttgactatcatacccctgatataggctcatgatgataccgaacaggtgatccattccagcacctttagcaacaccttgcgcttccattgcataagtctttctatccttaccgcagtttttattatgacagtcaagaactaagaatagagctcgatctaagtaattcagataagtcgtctcaaatgcttcaatttttctgtatgaatattcatcgccggcatacattgctttaagatcgtctgatgcaccgtcaataatagtcttaaacaatttttctggattatctaatgaactttttgtgctatgaagagacacgtaccagtcagacttaattttaaaatgagaaccatctttcattactgcaacatagccttcgatgttttctgcatttttagcttcttctacacatttagggctatcgatttcgaatcgttcaactagatatggacgaagagtagcatctttataaatatcatcgtatgaaatgtattcacctgtttcattttcacgaatattcaataaaatgattttcatctcttgataagcaagaacgattctattcgtcggagcgacgaattcgaagttagcagtaaatccatcttcagctaattctttaagtctatcacgcaaccgatggtgattaatattcatcaaaataccattagccattaaagcctgctcagatttgattgaaccctttgatttgaacagaatttcatcaccgtctaaataagttgataccaaagacccatcttcttttgttagaatgtaatcaacatcatttaaatcgatattcatcgtgaatggattttcattcaagttaaaaaacttttccatgggacgagaggcaatttttactggtttttctccatccatttcaaacataattccacgacattccaatgcgtctggaagtaaccaatcagaataagatgcataattatatgagaaaattctgtaagttcttccagatgcacttacatcatccgagtaaaaaaacttacgctgtgaatccttacatagttccattaaattgttaaaaagttcttgcattgtgtatcctcttttgtgttttgaatatagtaccacactccatgtggaagcatcattttttcttatgttgaatattccaaggcgggttaaacagtttaatgaatagtggctcctctaagtcaatcgttgcgattgtcattgtacctaactcatttgtcatagaaagattaaaacattggcgggcgtaaaattcaactttgcttccttcctttagagcagcatgaattaatgcagatttagtagaatcagacgttttgtctttacggttaatagcagttctataataatttattcttttacgtaaatttttagtttttccaatataaacaagctcatcatttatggcaatagcataaattacgttatacttgtttggaatagataattgttttatacttccgttgtcgtctaattctagctcagtatatttaataaatgaatattctgttgcaatttctttcataataaaatgggccttgcggcccactccttaaaaatattttttaaaactcatcataactttatcatcaacatcattatcaatctgtgcaacaaggtaagatgacagttctacttcttgtggcgcggattgaacattatcagaattaagatattcacgaatccaaggatatggatgtttaaccggagcatcggtaattgggcatggaagaccgcactgtttcatacgagatacagttaagtaatcaataaagctccacatgctatttgtatttagtccgggaacgtctccatctttaaataaatgaaccgcccaatctttttcttggcggttaacttccatgaaaatatcaactgcttcttgttcacactctttggcaattttaacccattcatcaccatcagtgccaagttgaagttgacgaataatatattgtgtacctttaagatgaagctgctcatcacgtgcaatgaacttcataatcttggcattaccttccatgatttccatgttcttatggaagttaaaggtacatgcaaaagatacataaaaacgaatagcttccaatgcgttgattacgtgcaggcagaggtaaagagagcgcattagttcacgtttccaatacatttcatgctctatggcatctttaatatcatcttcgtctgcgttaatttcttttttgtactcaatatcagctttagcattctgccaatatctagttttctcaataacatcatcataataacgaccaatagattcagcacgtttcatgatagctttatctaatacaatctcatcaaatacctttgatggatcagtataaagatttcgcataatatgagtgtatgaacgactgtgaatagtttcactaaaagtccatgtagcaacccatgtatcaagacttgggtctgaaattaacgacataagtacagcagacggtgcacgaccctgaatgctatctagaagtgattgatacttcaggttattagtaaaaatatcttgctgatattgaggaagcttgttaaattgcgcagcatccatcattaagtttacttcttcaggacgccagaaaaatgacaactgcttttcggttaaatcttcaaaaactttatgacgttgaatatcataacgcgcaataccaagacctgaaccaaaaaacataggttcttttaaaacatcaactggatttgtattaaaaactgtgctcataaattttccacttagttaatagatagtgactcgtccatgagtcaaattatatcataatttacaggatgaacaatcttcagcttttggagtttctatttcataatcatcagtaccagaaccatcgcgggtattatgataatagaaatttttaatgccataataccatccgtataacatgtcatcaatcattattgacattggaacctttccttttggaaaaatctgcgggtcataatatgtattcgctgaagctgattgacatacccatttcagcataatagctacctgcgtaagataaggtttattacctttcttagctaatttccatgtataatcatataggtctatgttatgttcaatattgggcacgacttgattaaaggaaccctcttttgattctttaacagagactggtccacgtggaggctcgataccgtttgtactgttagaaacttgggaagatgactcacatggcataagtgctgataatgtgctattacggatgccaaagagcttaaggtcttcccgcagcgacgaccagtcacaaacgtattttggagctgcgatttggtcaatctttttattgtaccagtcgataggtaattcgcctcgagaccaacgagtgtctgaataatattcacaaggtcctttttctttggcgagcttaatggatgctttaatgagtccatactgtaatctctcaaatagttcatgtgttaaatcgttagcatcttcataagaagcaaagttacttgccagccaagctgcatagttagtaacacctacaccaaggttacgacgctttttagctttttctgcttcaggaactggatatccttggtaatccaacagattatcaagagcacgaacttgaacttctgccaattcattaattttatcttggtcttgccagtcaaaattatctagtacgaatgcagagagagtacacaatccaatttcagcatcaggactattcacatcatttgttggaatagcaatttcacagcacaagttactctgacgaataggtgccttttcacgaataaacggagtatagttattcgtattatcaatgaactgcacataaatccttgctgttcctgaacgttcagtcatgagcaattcaaatagttcacgggctttaatacgctttttacgaatattagggtctttttctgctgcttcgtataattcacggaaacggtcttggtctttaaaataagaataatacagctctccacccatttcatgcggactgaacaaagtaatgtaatcgttctttccgaatcgttccatcatcaaatcattcagttgaacaccataatccatatgacggatgcggttttcttctacgcctttgttatttttcaaaacgagaagattttcaacttccaaatgccaaataggataataagcagtagcagcgccgccacgaattccaccctgtgaacatgatttaacagcagtctgaaaatgtttccaaaaaggaataacaccagtatggcgtacttcacccatgccaatcttagaaccttcggcacgaatcataccaacgttaattccaattccagcgcgtttagaaatatattcaacaattgaagcagaagctttattaattgactttaatgaatcaccagcttcaataacaacgcatgaactaaactgccgagttggagtacggcaaccagccataataggagttggcagtgaaatctgtcgagtagatactgcttcataaaaacgaataacatgttttaatctgtcaacaggttcatcttgatgcaatgccattccaatagtcataaatgcaaactgtggagtttcataaatttgaccagtggttttatctttaacgagatatttttcttttaattgcatcgccccggaataagtaaattccatatcccgctcgtgcttaatttttgattctaaaaatgtaatttcttctgcagaatattttgacaacaattcagggtcgtatttaccttcatttacacagtaagaaatatggtcaataaatgaacgcggttcatactgcccataaacatgtttacgaagagcaaacattaaacagcgtgcagctacatattgataatcaggttcttcaaccgaaatagaattcgcagcagccttaatgacaatagtctgaatgtcatcagtggtcattccatcacggagatatgatttaatattttcatataattcataaggatctacagatgttccttcagctgcccaagataaaactttaataattttttgcgggtcaaagctctgagaaacaccactacttttgataacattaattaattgcataagtcctcaacttgaaaatcgtctttaaacaatcggttaactatatgagctattatatcaccatgacacggctttggtttacatgtgcatcctagcctcattccacgtaaaggctctaaatgttctttagttatttctccggatttaattcgacgtataaaatcttttttgaataattcaatggcagcctcccggctgccagcatctttaccgacgtaatttccccaaaatgtaccacggtgaatattaacatcaaagtcggatttatatttattcactacctggcatagacggcccgcgcggcgataattcgtcatattgtttttccgttaaaacagtaatatcatagtaacaatctgaagaagttttaactgtagaaattttattatcaaaatactcacgagtcattttatgagtataatattttttgccataaatgataataggctgatttggtcctggaacttctaactcgcttggattaggaagtgtaaaaagaacgacaccagaagtatctttaaatcgtaaaatcatatatcctcgcaattaaattaaaattataccgccatctttcctttaattggcgggtgagatacatagttgttaagaacgaaatctttaggcctaagtttaagaacatattttaattgttctttagtagaaagatatcggaatttataaggtagaccacttattaccagctcacaaagctctttaggttcacgacgcaaaatttctttacattgttctacgtgattcatatagatatgagtattaccgccagaaaatatcaaatctccaggaataagattacacatcttagctacaatatgaactaacgcagcatatgatgcaatattaaatggaagaccaagaaaaacatctactgatcgttgataccactgcaaatccaaatagccattacgcacattaaactgatagaacatatgacaaggcggtaatgccatatatttaagttcagctggattccacgcagaaacaatttgtcgcctatcattcggcagttttttaatacgatcaataacttctacaatttggtctacaccgccaaaatcacgccactgttttccataaattggaccaagttcaccgctatggtatcctaaatcttttgcttgattttcgtaattttcatcccagactgttttgccttgaattaatgaatcatgctgaattaatcgtaaatcattgacatttgtgcttcctgataaaaaccaaagtagctcagcaatgcaagctttccaggcgagctttttagttgttactgcaggaaaacctttacttaaatcccagcgtaatttagtaccgaacaaagcaattgttcctgtgcctgttcgatcatcggtttcatagccattttcaaaaatgtctttaattaaatcttggtattgtttcatttagtaccttatataaattataatacattttatgaagctaaataatcaatacggtttagcatcaaattttctttcgatttcaggagtgaaatataattctttaccgcgtttagaaaagcgaccaataatatgataattattctcatcaaacgtaatattgccaatatccatggctttcaaccaaatatcgatatttctatccagttttatatcaaaattccaatacggagaactattaccgaaaatactgcaagcggattcagtgaaacaactgctataaatcttgtctttaggaactactaattgatagacgcctttaataaactgaggaccctgccattttggttgtttcgcgtctttttctaatagaatagggtaataattaaagttcatattttccgccacgcgttatttcatttatacactgattccgtaagggttgttacttcatctattttataccaatgggtttcaaccatttcacgcttgcttatatcatcaagaaaacttgcatctaattgaaccgttgaattaacacgatgccttttaacgatgcgagaaacaactacttcatccgcacaaggtaatgcagcatataacaaagcgggtccgccaattacgcttacattagaattctgatcaagcatagcctcgaatggtgcattaggacttgacacttgaattgaaccgccagaaatgtaagttatgtactgctcccatgtaatatagaaatgtgctaaatcaccgtctttagtttcaggataatcacgctcgaggtcacatactacaatatggctacgaccaggaagtaatgtagacaatgactggaacgttttagcacccataatcataattgtaccttcagtacgagctttaaaattctggaggtcctttttaactcgtccccatggtaaaccatcacataaaccgaatgctaattcattaaagccttcgaccgttttagttggagaataagcgaataccaatttaatcattacgcaaaacccctttcaataaaccattcagtggctttattagcgtcaaagaataattcttcatacgtcttttctttgttttcaaagactgtcacacaaacacgttgacattctccgcagtattcttctgacatactcaaagcgtcagaaaacatttcattaaattcatttaaatcaggattatgcaatgcgttaaaaattgcataatcgaattcatcattcataaattcaaatacaaaaatcatatcatctccttcaaacagactttttcacaattttccaatcagttttaaactgctcgacgtcagaatggtaaatccagaatcctgcgctttctccgtcttcataaagaggacatccatcgcattcatcttcccatcccatatcacgtaaaagatgttcagctttttcaacaagttcagaatctttaccgatgatattaaaataccatttacctctaacttctgaatctttgatgctttggcgttgtaatctcattttattctccttagttgatagggtaatagtatcacactactacccttctgtaaactactttttgaaagtttttcgcaaaagttcaatgatttcatctacattgttttcgtctacaatgcagtgaatttttgttacgccagaaaccttgtcttcgatttcatcttcttcagaagtctgttctttatactcacgaaaacaatgaaattcatcttcacaaatgttaaagtaaaaatgctttccatttgcgcattcaatgtgttttattgctctaaatccatcaacaaagaaagtttctttaacttcaaaccacccgccattttcttcaataattttaactattgatgaattagaacgtgggcgataattaataaatgtatcaataagtcttggaacaagttcatactttttgccaatatacattacgttttcctcattttaacggggctgtaatagccccttgataattattgttcaatcagtcccatgtaaaattctgcgtcttcagaatccataccatcgcaatattcattagccataaagcgggtgaggtcttcaagaggaccttcaataacgatttgaatactccaaaacttagaatcttgcacgcttgtgatactaagttcaggataacgattacgaataatttcttcaatatattcaaaatcaacgatgtcaatatcaactttagccatattattttcctctttaatcatcagcagtattgccgatagttgtatagtaccatggaaggacaaggatgtaaaccgttttgtgaaaaatttttgaaataaaaaaggggaccctagaggtccccaattaattagtaatataatctattaaaggtcattcaaaaggtcatccaggtccgtgtcatcagcactagatgaactgccagagcttgagctcataaaatcatcttcagtttttgtattgaagtcatcaacattgaatgcatccaaatcatcagcaactttatcagctttcttagcagcagtcgctgcggcaccacccatagcagcagttcccataacttgactaaacttagtgctcagttcttcgaacgatttgaatttatctttagaagtcatttcagaaaggtcaaccatttgttcgaacagttctttctggaaagattcatcgtcaatgtttggaatcgcagattgattcaggaatttagattcgtcgtagttactaaatccggaaacttgtttaactttcagtacaaagttagcaccttcccacggacaagttacatcaaccggagtttcacccatttcaacatcaactgcaatcattgcattgattttatcccagattttcttaccgaaacggtatttaaatactttaccttcgttttctggagcagctggatcttttactacaagaatgttagcccagtaagaagttttacgtttaacaagaccgtactctttattgtcagtgttgtacaaatcatttttactgatgtactgacatactggacaagaatcgtaatcaccgtgggtagatgagcaattttcgatataccatttaccgtttttcttgaaaccgtgatttacaagaattgcaaatggtgcttgttcatcatttttagacggaagaaaacgaattactgcttgaccgttacccgcattatcgagtttcagtttccactcgcctttatcttcagaagaaaaaccacctttatttccagccagtttagccatttgtgcagcgagttcagcagtagatttacgtttaaacatttttatttcctttttaatttaattaacagttggtgctatgacgatgtatgacctcatagctggtcagtgagataattataatctatttataataagcaattaatacttgcaagatttcacagtttcaatgaaaacatttttagctttctgtgaatcaatatttaaaatttttctataagcctttaactttatagaataattattccagactaaattatcagtctgttcatcgtgtttatcaattatatttaaaaacgaatcaagcaagataaacgtttcaaacgaaattatattcgactgaagcagtttaaaaatataacttgattgaacctttggattatattcaaagatttctttaaaagcagaaacttcaacttttttactaaaataataaatgttgcgaatatcttcttcaaacttaaatttaatttgctttaagcgtccgatatattcacgataaaacacaagtgcatcagcgtcagagatgtcaccaatccaagcatcttggttagcaaccaaattacttataaaaattaaagcaagttcctttaatttatatttttctgataacttctggaaaaaatacttatcccttcgcttttgataagcggcatcagacacccgcatgcaccaattatacttaataacatcatactttccattcatatgctgttttatcattaagtataatttataaactgatttaccatcaatgtatctttcaccaccagcaggcatgcggaatttaatcatagtagaaaatctaatgtattagttttttcacagcgaacaacagaaggacgtaaaagattttcgtcaatagcttctgactgaattttttcaattatacccgaaggaataaatttagcaaattgagtttcaggaatagaattttcttctaagaatgctgttgtagcttcaagataactcattccaaactcttctaccattttttcaataataaatccattttcttgacgatcaagaagctttgctatttcatccttttctttcttgattgaaagttctttttctgaaagaccggtctcatcgaccggacgaatatcatttagagaaaactgtgtcataaagttcaactacctcttcagtttcagcttcaaacacatcacggttatctttatgatacaaagctaatagacgattaaacatcttaccatcaacgccaagttcatctttagcacgaattcgaatatctttaatcagttcattataaccggaaattttcagtttatgatcagatgcttctttaataaatttagccaagtcttcgccatggatagcttcatcaaattcaaccatttcttttttagccattattcacctcaaaattcattaatgctattagttaatttagaaagacccgcttttacaaaatatgaataaattttgccacgcggtggtaatttatatgaattatagtaattcacaatgtttgaagcaatattatcaggaatataatcaaaatcaattagaactaaattttctttataacgattatattcagattctgtgagaagcaccttagcttgctcacggtcattagcaatggcttcaacgattgaagttttcattgaaggagttcgttcaccttcaactctggtaaaccagaagtcagatcgtactttaactgaagcaacgttatcctttttgtcgcctttaaggattttagtcatacagtcaatttcagcagaaccgcttttaattttaacccatttcttatgcattggagaccattgcttaacatttggatatttgtgaagctgtgtaaagtcaccatccgacgaaatgattaaaatcttatgtccttctaaagagaactttttaacaagaacagcaatatggtcatccgcttcatacttatcaatatccataacaatgtatggcatataagctttcaattcatctataactttatggctggattcaaaataaccttcccagtcccaagtagattcttctcgtgcttttccacggtttttcttataataataagcaaaatcacgacgccaatatccagatttcgcgttatcaatacacaacacgattttagtgtatccaagcgtttttgcttttttgacattaaacttaattgagttcaatatcaaatgacgaaccattgataaattaattttttctttatctgggaagtttactaaagcagttgaaagcgcaatttgactaaagtcaataaagcaaattccctctttgtaatcttcatccagcatcatttctaaatccatatgaaccccgttcaattagtgagatttctattatataccatccaaatcttaaagtaaacaagtataaatacttattattgaaaacacaataggagcccgggagaatggccgagattaaaagaaagttcagagcagaagatggtctggacgcaggtggtgataaaataatcaacgtagctttagctgatcgtgccgtaggaactgacggtgttaacgttgattacttaattcaagaaaatacagttcaacaatatgatccaactcgtggatatttaaaagattttgtaatcatttatgataaccgcttttgggctgctataaatgatattccaaaaccagcaggagcttttaatagcggacgctggagagcattacgtaccgatgcaaactggattacggtttcatccggttcatatcaattaaaatccggtgaagcaatttcggttaatactgcagctggaaatgacatcacgtttactttaccatcttctccaattgatggtgatactatcgttctccaagatattggaggaaaacccggagttaaccaagttttaattgtagctccagtgcaaagtattgtaaactttagaggtgaacaagtacgttcagtactaatgactcatccaaagtcacagctagttttaatttttagtaatcgtctgtggcaaatgtatgttgctgattatagtagagaagctgtaattgtaacaccagcgaatacttatcaagcacaatcaaacgattttatcgtgcatagatttacttctgccgcaccgataaatattaaacttccgagatttgctaatcacggagatattattaatttcgttgatttagataaactaaatccactttatcatacaattgttactacatacgatgaaactacttcaatacaagaagatggaactcattctattgaagaccgtacatcaatcgacggtttcttgatgtttgatgataatgagaaattgtggagattgtttgacggggacagtaaagcacgtttacgtatcataacgactaattcaaacattcttccaaatgaagaagttatggtatttggtgcgaataacggaacaactcaaacaattgagcttcagcttccaactaatatttctgttggtgatactgttaaaatttccatgaattacatgagaaaaggacaaacagttaaaatcaaagctgctgatgaagataaaattgcttcttcagttcaattactgcaattcccaaaacgctcagaatatccgcctgaagctgaatgggtaactgtccaagaattagtttttaacggtgaaactaattatgttccagttttggagcttgcttatattgaagattctgatggaaaatactgggttgtacagcaaaacgttccaaccgtagaaagagtagattctttaaatgattctactagagcaagattaggcgtaattgctttagctacacaagctcaagctaacgtcgatttagaaaattctccacaaaaagaattagcaattactccagaaacgttagctaatcgcactgctactgaaactcgcagaggtattgcaagaatagcaactactgctcaagtgaatcagaacaccacattctcttttgctgacgatattatcatcactcctaaaaagctgaatgaaagaactgctactgaaactcgcagaggtgttgctgaaattgctacgcagcaagaaactaatacaggtactgatgatactacaatcatcactcctaaaaagcttcaagcccgtcaaggttctgaatcattatctggtattgtaacttttgtatctactgcaggtgctactccagcttctagccgtgaattaaatggtacgaatgtttataataaaaacactaataatttagttgtttcacctaaagctttggatcagtataaagctactccaacgcagcaaggtgcagtaattttagcagttgaaagtgaagtaattgctggaaaaagtcaggaaggatgggcgaatgctgttgtaacgccagaaacgttacataaaaagacatcaactgatggaagaattggtttaattgaaattgctacgcaaagtgaagttaatacaggaactgattatactcgtgcagtcactcctaaaactttaaatgaccgtagagcaactgaaagtttaagtggtatagctgaaattgctacacaagttgaattcgacgcaggcgtcgacgatactcgtatctctacaccattaaaaattaaaaccagatttaatagtactgatcgtacttctgttgttgctctatctggattaattgaatcaggaactctctgggaccattatacccttaatattcttgaagcaaatgagacacaacgtggtacacttcgtgtagctacacaagttgaagctgctgcaggaaaattagataatgttttaataactcctaaaaagcttttaggtactaaatctaccgaatcgcaagagggtgttattaaagttgcaactcagtctgaagctgtggctggaacgtcagcaaatactgctatatctccaaaaaatttaaaatggattgtgcagagtgaaccttcttggagagcaactactacggtaagagggtttgttaaaacttcgtctggttcaattacattcgttggtaatgatacagtcggttctacccaagatttagaactttatgagaaaaataattatgcagtatcaccatatgaattaaaccgtgtattagcaaattatttgccgttaaaagcaaaagctgtagatagtaatttattggatggtctagattcatcccagttcattcgtagggatattgcacagacggttaatggttcactaaccttaacccaacaaacgaatctgagtgcccctcttgtatcatctagtactgctacgtttggtggttcagtttcggcaaatagtacattaactatttctaatactggtacgacttcttctcgatttacatttgagaaaggtcctgcttctggtagtaatgctgattctgcattgtatgttcgtgtatggggtaataagtacagcggcggttctgatgtaactcgtgcaacgattatagaattctctgatgctaccggctctcatttctattctcaaagagatacgtcaaataatgtgttgttcaacatttcaggtacgatgcaatcagtcaacgctagcgttcgtggtgttctgaacgttacaggtgtctcaacgtttaatagttcagttacagccaatggtgaattcatcagtaaatcaccaaatgcttttagagcaataaatggaaattacggattctttattcgtaatgctggtaatgacacctattttatgctcactgcagcaggtgatcagagcggtggatttaatggattacgtccattatcaattaataatcaatccggtcaggttacgattggtgaaagcttaatcattgccaaaggtgctactataaattcaggtggtttgactgttaactcgagaattcgttctcagggtactaaaacatctgatttatatacccgtgcgccaacatctgatactgtaggattctggtcaatcgatattaatgattcagccacttataaccagttcccgggttattttaaaatggttgaaaaaactaatgaagtgactgggcttccatacttagaacgtggcgaagaagttaaatctcctggtacactgactcagtttggtaatacacttgattcgctttaccaagattggattacttatccaacgacgccagaagcgcgtaccactcgctggacacgtacatggcagaaaaccaaaaactcttggtcaagttttgttcaggtatttgatggtggaaaccctcctcaaccttctgatattggtgctttaccttctgataatgcaacaatcggaaacttgacaataagggatttcttaaggattggtaatgtccgcattattccagaccctgtgaataaatctgttaaattcgagtggattgaataagaggtattatggaaaaatttatggctaagtttggacaaggatacgtccaaacgccatttttatcggaaagcaattcagtacgatttaaattaagcatagcgggatcttgcccgctttctacagcaggaccatacgttaaatttcaagataatcctgtaggaagtcaaacatttagcgcaggtcttcatttaagagtttttgacccttccaccggagcattagttgatagtaagtcatatgctttttcgacttcaaatgatactacatcagctgcttttgttagcttcatgaattctttgacaaataatagaattgttgctatattaactaacggaaaggttaattttcctcctgaagtagtatcttggttaagaactgcaggaacgtctgcttttccatctgattctatattgtcaagattcgacgtatcatatgctgctttttatacttcttctaaaagagctattgcattagagcatgttaaactgagtaatagaaaaagcacagatgattatcaaactattttagatgtcgtatttgacagtttagaagatgttggagctaccgggtttccaagaagaacgtatgaaagcgttgagcaatttatgtcagcggttggtggaactaataacgaaatcgcgcgtttaccaacttcggctgctataagtaaattatctgattataatttaattcctggtgatgttctttatcttaaaacacagctatacgccgatgccgatttacttgctcttggaactacgaatatatccattcgattttataatgcatcaaatggatatatttcctcgacacaagctgaatttaccgggcaagctggtgtttgggaattaaaagaagattatgtagttgttccagaaaatgcagtaggatttacgatatatgcacaaagaactgcacaagctggtcaaggtggaatgaggaacttaagcttttctgaggtatcaagaaatggtagtatttcgaaacccgctgaatttggtgtcaatggtattcgagttaattatgtctgtgaatctgcttcacctccggatataatggtacttcctacacaagcatcgtctaaaactggtaaagtgtttgggcaagaatttagagaagtataaattgagggagccttcgggttccctttttctttataaatactattaaaataaaggggcatacaatggctgatttaaaagtaggttcaacaactggaggctctgtcatttggcatcaaggaaattttccattgaatccagccggtgacgatgtactctataaatcatttaaaatatattcagaatacaataaaccacaagctgctgataacgatttcgtttctaaagctaatggcggtacttatctaaaccgagttatctttaaccggggtattcaagtcccgggagccggcaatggtctgaccgggatgtttgttgggccaggtgatggagcaacttatgataatgttaaccttgatataatatcttggtatggtatcggatttaaatcatctcaaggaacaggacccaggacaattgtttttaacgttcgtgacggtgaaatttcggcccgtggtaatataaattcacagcgtcaggtgcgagccgaagccgcagcgcccattgccgcgaatgaccttactagaaaggactatgttgatggagcaataaatactgttacagcaaatgcgaactctagagtgttgcgttctggcgatactatgacaggtaatttaaccgcgccaaactttttctcgcagaatcccgcatctcaaccttcacatgttccacgatttgaccaaatcgtaattaaggattctgttcaagatttcggctattattaagaggacttatggctactttaaaacaaatacaatttaaaagaagcaaaaccgcaggtgcacgtcctgctgcttcagtattagccgaaggtgaattggctataaacttaaaagatagaacaatttttactaaagatgattcaggaaatatcattgatttaagcatttctgctggtggtaatatcagtggaaatatcactcaaactggtgattatacacagactggaaaatttaatttaattggtccgcaaattgtagcaagcggtggatatattgagtttaattatcgtactactggaagtggggcttggtccggtcaacatactgcgaaagctccaatttttgtagatttaagctcagctacttccacatctgaatataatcctataattaaacagcgctttaaagatggaactttttcattaggtactttagtttctgaaggttcgttgaagattcattatatcaatgaatctggcgattcgaaatattggacgtttcgacgtgacggcggatttactgttgacggtggaggtttaggagtatcaggaggtagtataactacatctggaaatattgcagctctcggaaatattacttcgcctcagattaatactaaaaatattattttagatacaaaagcatttggacaatacgattcgcaatcattagttcaatatgtttatcctggaacaggtgaagaaaatggtataaactatcttcgtaaagttcgagctaaatcaggcggaaccatttaccatgaaatcgcttcagctcaaaccggtaaaaatgatgaaatttcttggtggaccggaaatacacttactactaaattaatgggtcttcgtaatgatggcgcaatggtattacgtcgttcacttgctattggcacaattactgctgacgaaaataccaataactacggctctcctactccaatgggagaaagatatattgctttgggcgatgctgccactggtttaaaatacattaagcagggcgtttatgatttagtaggtaattggaattctgttgcttctattactcctgatagtttccgtagtactcgtaaagcattatttggacgttcagaagaccaaggcggaacctggacaatgcctggaacgaacgctgctctcttgtctgttcaaactcaggcagatgtgaataacgcaggtgatggacaaactcatatcggttataactccggcgggaaaatgtcccactatttccgcggtaaaggccaaactaatattaatactcaaaaaggcatggaagttaaccctggtattttaaaattggtaactgactctaataacgtacagttttatgctaatggaacagtatcttcaatacaaagaattaaatttgataacggattagttcttactggtgctagacccgacggtattcaacttgacgctcctacagcagcagatggcactaaaactatactgtgggctggtggtactcgcgcaggtcagaataaaagttatgtatctattaaagcgtggggtaattcatttaacgcatctggcgatcgtgctcgtgaaacggtttttgaggtaggtgatgggcaaggtttccatttttattctcaacgtgtagctcctgcgcctggttcgactgtcgggcctattcaactccgagttaatggtggtttattaactgcaggtagtattgttgcttctggttctattacaactgaatcttctttaaatgttaataatggattgtctgtaaatggacaagctaaatttggtggaacagcaaacgcactgagaatttggaacgctgaatacggtgttattttccgtcgttctgaaagtaacttttatattattccaaccaatcaaaatgaaggcgaaagtggagacattcacagctctttaagacccgtgagaataggattaaacgatggtgcggttggattaggaagagattcttttatagtagatcaaaataatgctttaactacgataaacagtaactctcgcattaatgccaactttagaatgcaattggggcagtcgacatatattgatgcagaatgtactgatactgttcgaccagctggtgcaggttcatttgtctcgcaaaataatgaaaacgttcgtgctccattctatatgaatattaatcgtacagatacaagtacttacgttcctattttaaaacaacgttatgttcaaggaaatagctgttattctttaggtacattaattagtacgggtgattttagaattcattatcatgaaggtggtgataatggttcaacaggtccacaaaaggcggatttagcatggcaatttagacgtgatggctcgttccgttcacctaataaaattgaaattaatgccgttacaattggtactgatggcaacatcacaggtggtactggtaattttgccaacttaaataccacgttaaatcgtaaaacgactgtgggaggttgggctggtagttccgttgttggatggtacaaatttgctacagtaacaattcctcagagtactggcacagtaacttttaaaatttccggtggagctggttttaattttaaaagctataaccaagcttctattgctgagatagttcttcgcacaggtaataatcctaaaggcataaacgctgtactatggaacaggtcagacctgagttttaatcagatagctactatgaatacatctgatgatacttatgatgtatacgtattctgtgaaggttatacaaacgcattgatagttgaatattcatgtagtgaaaactcttcagtaactgtagtcggtcttaacggaggcattcaaccagttgttgatgcattgcctgagggacatgttgtaggtaaaacagttcgtctgttaaataatattggcggaactttcgcagctggcgaatctgacattgttactcgtggtgaatacgttgctgataatcaaaaaggcatgcgtattaaatctaacggtaataatatcggttctaatgctgctatacttcgaaatgacggcggaagtttttatattttagctacagataaaaatacagcagaaaaatccgatgcagctaatggtgattggaatggcttaagacctttcgccattaatatggctgatggtcgcgttggtatgaaccatggtctaaatattaccggcggtggcttgaatgttactggtggcttgaatgttactagtggtaatactagtttaggtaatatttcgtctcgtgtggtggctcgttggcgaggagcgtccggttgggctgataactcggatacaatgaaatctaaaatcacctttatggcagaccatggggatttatctaattcagacagttattatcctattgtaggcgcatacagcaactatggttcagcgggttatcgtcaaacctttgagttcggatgggtcggttccggcactacagcgggttggcgcgatggtattattcgtattcgcggagataatgctaatggccagcaagcaagatggcgctttacaatggacggtactttagattgccctggtaaagtactgctaccacaaacaggtgcctttggtgtcaatacatcaaatggtctcggtggaaatagtataacatttggtgatagcgatactggtattaagcaaaatggcgatggattattagacatatatgcgaacagcgtacaagtattccgtttccaaaacggtgatttgtactcatacaaaaatataaatgctccaaacgtttatattcgttctgatattcgtttaaaatccaacttcaaacctatcgaaaatgcgcttgataaagttgaaaaacttaacggtgtcatttacgataaagctgaatacatcggtggagaggcaattgaaactgaagcgggtattgtggctcaaacgttacaagacgttttaccagaagctgtccgtgaaacagaagacagcaagggtaataaaatactcactgtttcttctcaagcccagattgctcttctagttgaagctgtgaaaacactttctgctcgtgtaaaagaacttgaatctaaacttatgtaaaagagggcttcggccctctaaggatttttaatggcaattgtaggtgttcctggctggattggagaatctgccgtgaatgaaactggacaacgctggatggatgctgcgatgagagctgttcatgtttcagttcccggctggatgagctcaatggcaggacaatcaaaagaaatttatctatctataggggctaaccataattatgatagaaactcccttattaactggatgagggctcaaggtggtgcgcccgtggttattacaatcactggtgacttagtatcaaacagcacaggtaacgcttgtttggaatttcctagtgaccttcctaacgcgtatattcaacttatcattaatagcggtgtgactgtttatggccgaggaggtaatggttctactaatagttcggcaggtggaaacggtggtacagctatccataatgcagccggaactaaactccgtattcgtaataacggcgctattgccggtggtggcggtggtggcggtgccgcatcattgaaaaatagctatccaactaatggtagctgcggtggtggcggcggtagaccatttggcgtaggtggcaaaataggctctgactctatattgtccggttcgaatgcgtctttaacagatgccggtacaggtggtactacattccaatacggcgcaggtaacggcggtaacgttggagctggcggtggacgaggatggggcaaaaatgtttatacttcagagggtggcgcagctggtgctgctgtcacaggcaatgctcctaactggcaaaacgtaggaactatttacggctcaagagtctaatttttgaataaatatcttaaaaggagggtctatggcagcacctagaatatcattttcgccctctgatattctgtttggtgttctagatcgcttgttcaaagataacgctaccgggaaggttcttgcttcccgggtagctgtcgtaattcttttgtttataatggcgattgtttggtataggggagatagtttctttgagtactataagcaatcaaagtatgaaacatacagtgaaattattgaaaaggaaagaactgcacgctttgaatctgtcatcctggaacaactccagatagttcatatatcatctgaggcagactttagtgcggtgtattctttccgccctaaaaacttaaactattttgttgatattatagcatacgaaggaaaattaccttcaacgataagtgaaaaatcacttggaggatatcctgttgataaaactatggatgaatatgcagttcatttaaatggacgtcattattattccagctcaaaatttgcttttttgccaactaaaaagcctactcccgaaataaactacatgtacagttgtccatattttaatttggataatatctatgctggaacaataaccatgtactggtatagaaatgatcatataagtaatgaccgccttgaatcaatatgttctcaggcggccagaatattaggaagggctaaataattatttgtttgtatacatctctagatatcgatatacaccctcaaaaccctcgttgaattcgtcgatgagggttttcttatcttcttgagttaattcagaaacaattttacggaatgaattctgatttaactttctaccttcatgcgttactccaatctcattcagaaatgcaataaaattagcacgattctcaacaatatcttctctggaaaatttaatcaaaatagacgcaacagtaataatttcacgaactgtatcaatatttttattcattaactataccactcaattagttgactttgttaatatcatcagacgcttgatttgtaaactggtctgtgttattttcttcaaaaattttttctacgaattccttgaacgactcacgttcctgagctacattgtgctcgattacattttcaagattatgactcattcgaaataatcttcaatttcgtaatcatggacataaaacattatagtttttaatacatcatcaatactttttcctggagctggaattacgtaaaaataccctgcttttgagaggtctttataagttccaatcaagaaatcattattctcaagatgtaactcttcaactaattcattaacaattgagtggtataaatttggtagaaacttatatagcttttctagaatatcaattttgattgtgtattgaaccacagattgagaatcaataatcatagaccttccccttatgtttctgtttgcgattagattctttaaacgctttcttcttatccttatgaacagaagctttattaaaattatgttttgcgactaaattgttcatagtgctgaattacctctctcaaacatttgcatgtgaatgaaaactttttagctacaccacattcaaatatatgttctcttaaatcacgtgtatcggtatatcccatctcaacgataaaatgccgtattagatttttatctttatcattgagagaattaaaataatcggattttgaattaatttccctggccaaattgaatcaccttcagttgacgttttaattcttttatcatctcttcgttcatcgcaatataaagatcgcgtaaagcaggttttaacattccatttactggagaactaaatggacatacataatcttttcctacgagctttttagtgaattcaatattacagaactgaaatgccggctcattggtataaattccccaattagttgacatcattttattggcatattccagtgcctggatttgattcataattccatcaatttgaaactgtttaatattcattagtaaaggtcctcagagtaaagttctttttcactaccaccacgttcaatacgtacttgtccagcgtaagttgcaataatcattgcttcttcacgtgtccaataattactatattggtcaataaacccttggtcatcatcacaaacttgttgagtaactaattgaggtttaactacatctaaaacttctgccatatctttagaataatgacgagcacctggaataataagagttcgtccatcttttaatttaaaacgattagctgcacagacaattcgtcgttgatacttttggttttcatcccaatatgcagtctgccaacagatttcaggaacttctttcagaatatcttcttctgtgcatttataaccatgcgctttaaatttttcaacaagactttctggagtttcacgagataaaggaacattcagcatttttaaacgattaataaatgggttcatttaaaccatcctttaatacgttgccacaaagttttctgctgagctttgttgacaccaattgaacgaataactggttgagattcctggaattctttataatcggcaaggtaaatttcgtaagctgcatccgtaaatgaacttatcgctgccataaaattattgcgaatacctactggagcatctttactttcacgaataatcatgtatttaccagtcttaatctttacaatagttccaagataagctatggtaccaaatatcccaaccctcttgagtaggttctgcacaacgacgaagttcattaacaatttctaacttgttcattatttattcctcacagttcagatgctacagtgattacagcttcaatgttttctgccgagcgtttaatgtcaagatacacattaccgtttttagcgattttacatgacattccgatgtcagtaaatttctgaatatgatgttccatcattttatatccaaaaattcgcatatttccattgttgttaatttcaaaattacgaattccgtgagtgcgtttttctaaaatagcgagatagttactgcgataagtttcaacctttttaagaacaaatccattttcatctaaaagttttaacatgaggtctttatcttcttccatatcggaagtaatctcacgagctttacgagttgctcgttttttcagcagttccggagcattttcttgtgcgtataaagttgctgcatttgaaataatatcctgagcttcaccagtaatgattaatccatcaccagatttctccaccaggccttttttaatcaataccccaatattactattaactactgcgttacctaaatctggatgcacctcacgaacttctgcagctgtaatgaaatctttcttagcaatggtaattaaaatcgcagcagttttttcattcagaacatcgttagaagctttgatgatgtaagttactttagacattttctaatctccgtaattctgtatcagtagttgatagttgtataataccacagtatgctttggttgtaaaccgttttgtgaaaaaaattttaaaataaaaaaagggagagcctcggctctccctaaaattactgcatgactgtgataactgtcatgataacacgttgaattccgaacgcaagaagacctcctgctacggctggaacaacgcctaaacccgccagtaaaatgctaccggatactaatgcagcgcttgtaatacctatgaatggactcatttgatttcctctaaatctttggtgtattcggtaactacatcagtagttttccaatattcgttttcttcttttttagctttagcttcttcagcaagtttcttcgcttcatcggaagtcatatgaaaaatattcattccaactagtttatcaacataagaagaatacatatcgattttcgaaagttcttcggtcagttctttacgagttttaccctgtacaacaatttcacctgaaattactttcttaatgaaatgtgctttggcaaaggctaaacgaaaagctgactcagtttctttaattttgttatcaattcgtttttggacataagttttacgaacttcaacaaagtctttaattaaatcaactacgttatcgtaaacttgcagctttcctttctcattaataaccgtaatattctgggaacgacgttcaatcagtccgaagtctttcataatttttgcatggcgttcttcttcgttatcgctcaaagaatattctttacggaatttaactttgaatccaaaaccatgctcaccacaagcatcatcccatgtaatgaagcctttatcttcaagtgggtctaaaattttactcacgtaagtttcacgatcatacttatacggaatctcagtgatatgcatttgagttcgtgaagtaaacttatatgttccgcgaatttcatattgaccatcaatctcaacgacttcaccacgaaattctgggaattctaccttcggtttagttactttctttccttgaagagcttgcagtacagctttcttgacagaagaaacactatgaggaagaatgtaagttgcataaccagttgcaataccggaaacgccattaagaagaacagtaggaataataggcaaatagaaagcaggcggaatgtgttctttatcttgatgtaccggagcatattcagtatctttatatacgttatagaaatttttacttacacgagcaaaaatataacgacttgccgctgctttttgaacggtacgagaaccgaagtttccttgaccatctaacagaggaaagttattattccaagtgttagccatcaaagctcccgcatcttgcgcagagttttctccatggtgatatccaaggtccgctacaccacctgcaatagaagcgagtttgtgaaacttatctttattccctcgtgccaaatcaagagctcgagcaataacaaatcgttgaaccggcttaaatccatcaatcatatttgggatagcacgattttcaaccgtgtacatagcataagccaatgcttcattatcaatgatactttttaaatcgcgattattcagttgcataaatttaccatactagtgaatgtagtgccataataacatcagaaatgaaaagcacgacttgaattaatccgaacattattccgtaatataacgctatcaataaaatagcaaggtctaatgaatagcccaagattttcttaatcattagataacaacacaaatgttaaatatgcacacataccctgggctaaagcctgcgaaaacacactactggcatcgatacagatagttaaaacacatgctactatccaacaaataaattaaataactcctaataattttgcgatattcatagtgttctcctcaactattttttaaaacctaaaataccaaagtttttaagattgttacgatagaactgcatcacatgttcgttatggaaattactcattaatatgcctgcaaaacgaatttaaaattatcagccaacatacggttcatttcttcaagtgtttgatactcagaatgatgattacgagtaaacgctaaagctaactgtccttttccaaatcccgtcgtcagaggtttcatcttagaagcaggcagataaaatactgtgtatggaacattgttatttgcaatagtacgtgcaagctgagaccgacgttgacgaatatgacttagaactgcactgaatccttgcttagaacgctgattacctacataaaatcgtgcagacacgcatggattactaaatggacgaccatctaatttactcactaaaaagtaaaatccaggtttagataaaatatctttatgcggagttcctaaaaaccattcaccacccttaattgtaccaataacagtagcgcctgcattattcagatcagtaacagtcatatatttcatattaatttcctctaaattattttctactccaaggccgcatgaatacacacggccattaaattaatcgtcgcagtcgacgctcaattcccaaaactcttcaacagtataagtttcagtatcattttcaatacagaaacgttcattactgttatttgctaaagtagcgttaactgtcattttctcgctggtgctcttaagaggtgaaatacgaattagctgatcaccactatccaagcaaaaaatttcgccaacttttacatctttaaaaattttcataattcacctcagggagtataaaacccaaatgcagttgttgaccatcccatccaatacggaaaatttgcaccgatgtaaaacacgagaatataaaaccaaatacccagtaaattcatcattttacaccattccaaattgtttcaactacggattttaaaccattttgatgaatatccattccgactacttccatcaaatagattccaactacaacttaacccaaggcgaaaatcagcatgaaaatgaataaagccggaaaaatattatcgaaaaaccattccataaatgtaaaagcactgcgtttactcttcatattttcctcacataaatccaaagtaaacgtttaatacatcaatcattaaaacgattgggaatatactcaaaactattagtattataactacattccatatagctttaacaatctttttcattttctgttcctccgtagttgatagagtaataataccacagaggaacaatcttgtaaacaacttttttaaaaatattcgtaataaatgtgaataccaatcactactgccgaaacttgtgcaacccaccacgcacaagcaataagtacagaattaaaaattttcataataacctcatcacaaaagtaaatgttaaacaaattaatggaatactaattaaccaaacaaaacaccaccataatgaactcatagttcaatctcaacgattttcattttactcaataatccgctaaaagatcgacgattgcatcacgaagacacttattcgcaatacgtttaagagcaatttcagtttctggagcattttgaataatcattgaattcaattcagcctcagcaaactgaagttctttaactaattcagctttatattttccttgccctttcttagcttttgctcgttttagttcagctgtagtaaacattttattctccaaatccgtatcagttgatagttgtatattaccacagtccttgtggtatgtaaaccgttttgtgaaaaaatttttaaatggaaagataccatccgttgtagttgctttttcttacaaccttacgaaggtcttctctatcaccgatgaatttcggagtgtactggatgacacctggatgaatttctttagtgttgaatataattatacagtcagcgacttgatgatttagaatgggccctagatttattccagaaccatatggatactctccgctgcatccggttgttaccgaaatccatcgtgagtcagtttgatgtgttttgacttctacacgaagcccacagtattttggatgcgccaatacatcccatgcatatgtatatgggtcattaacatcctcttggcctttgttaacatacccgcttagccaatctgctacaaaaaattctgcgtacacagcgatacgacatctttcaataacttctgctttatcctggttcgggttttgttttaaagagtatcttgctgtatcagcaattttgaccttcatttcactagtcaagtcactgttcgatagggtaaatgtcggaatctgaaatagtctctgtaaacccggattcgttttctgcattgaactttccttttacgtcggaatcactgatattcatataaatcataatttctcttaaaacaaaagggccgaagcccttattttatttgaattgcgcaattcttttctctagacactcagcataagatttcattgagataaactgcgaaagtagcagttcttgctcaactgcactaaccgttagaaactttgtgctttctaaaaatttactcagtgcattaattttgagcattaattgatcgtattcttcttttactcgtgcttgataacctaacataattttccttaatatgataagggccgaagcccttatttaaattgttcagtaacgtcttcaactacttcgtattggcaggtacgcattttagcatcgttgtaatcaatcggaattgatactacatcacgcggatgtactttaacttttacaactcgactggttgaactgccaaagtgacgaatataagatttagaacacacatgcagaccacgagaacaagtttgtgtatcatcgtcattcacacgagtacgtggcattttaactactttacccggactgttatcaaaggtgtttgagtgacagtcaaagtagttgtcacgaactactttccaagcatagaagtaaccatcttcggtgatttcaatatcgtttgctaccaagaaatcaaagagtcgagataccgctttttggcttgggttttccagcagattttccaagaacggaaaataaaattcaaagttttcgcctttttccatcgagtcaagaatacgatcaaccaaaccagaccgcaattcaatattttgatagaacaagcttccaccttcaattcgaacatcgccggaaatatatttttcaacagcgcgacgaacattaattttttgcgcagcttcttccagcttatccgctacaagcagattaagaatttcctgaaagtttgaatgagtattaggagttgcgttataagttacaccgtcaacagtaattgaaatgaattttttagatgcattccaaataatgtcagatttagcaactggagcaataactgcatcgctattaactttaactgtaatatcaccgctaatagtaactttagggcgtttagcttcttcagcatttttcaaaacacgacggattgtgtcaaccgatacaccttgccaatcagccaattcctgttgggtgtaattaccacttgaatacagtttaacaatttcagcttgttcgtttttggtcaggcatttaatattgtacat

SEQ ID NO: 12 - DNA, 167560 bp, Enterobacteria phage RB69
  source 1..167560: mol_type = genomic DNA
ttatttggccgcttccacggccttcatgaatttaacgatttgagcgacctgttctttggaaagagtaccacgtcgtcccatgtattctgacacaatatgataattggtttcaaattcaataaccattttatcatcattatcgtaagcattatctttaagcttatcgaaaattttagcacacaattctaacttcctgttcaggtctctgttatcagcacctgtgaatcgattccatccccagcgattatttactgttgagagttttgcaaagtctttactgatttctttgttcttagagctaaaatatttactaaggaaattaagctcttcattacgagtaatatgattcaaataaggctgtgctctacgacttggtgatacatactcatcataatccactttatcaattagcgtaatatagtcattaattgatttttcgaacaaacattctacttcaccaagtttacgaactttcttaacaatctgcggacggactacagtgaactctttaatacctgacaaatcggcaatacgagtcaagaaattagaatcatagttcaaccaacctttatctgcgtcaagacattcagcgttagaacgattacgaattacaacataaccttgaatctcatcagctttaccggccggaataaagagatcttctgatacccaaacatcgttttcattcttaaagaaccgatgagcacttggggatttaggacgaggctgcgatgaacgttctttaacttcaatccatggtttaactaatgcaagaatttcagaggtcttataaaatttaaggctatcaccagcgaaaataacctttaatcgttccagaagtttcattgcaacttcatcttccgggttaatgaataatacgctactaccccgtccggaaggaaccttatcaacgagtgttgatgcatctgtggaagtcaaagcatcgttcagagcacgcatcattggtacgcggcctttcacatcgtcaataacaatatcaatatgcttacgactaatacctagcaggctattaattgaaatagttgcagacgagcttccgctttcacgaatacgacgaagacgtgggtctgaaacgatatcatatacaacgccaaggttgcaccattcaggtcccattttaaaacgtttgtacaactcagaataagttagctgttctttagaatatttcagtgattcaatattagaaccagctttttccatgtatttacgagcagagtaaccaagagaatctatttcacggaatacatgacgtggatattcacaatcaatccatttcttagaatcttcagcaaataattttgcatcaatttctgcaacacgtttatggatatttgctactgtacgtttatcaaatgacaatgcttcacgagacggggctacatctagttcacccatagggaatttaatataagctgtagtgcatcgcgtcatcatccatgtttgttctttaataacacttccgattggatatacaataccaccataaacagccatgatattaccacgttcaccccatggagcttccttggctaaataaacatcatcgaattcagggaagtatttgatatctttaacaccacgaacttctgcaatatcgccgagaggacgcataacataagcaatttcggatgcgaacttttcaaaatcttctgggttaacaggcacaactacttcaacgccggtccggtcatcaggacccatcttatctacaaaggtcggcttaatttgtggacctgtgtcatcttggtagattacgtaaccacgaacttcaccattatgataagaagtaatgttaaacgtatcagtatatgctaatggagctttagaaccgagcccgaatccaccaatgaaatcgttactcgatgttttagttgaagcaaaatatgagttataaattcctggctcttcgtcattacctcgaatggtgaaatcgctcatacccggtccaaaatcacgaactacaaaacgtgggtctaaacgacctggagcctgaacaataaacttatcagtgcaaccgttaagaatttgtccatcgatacagtttgtaattaattcacgtacacaagccaattctttgtttgtataaaggtcattagacaaaatcttataaactttgctattgccttgaatagtgaatgctgtgctcttaccgcctgaaccaataatcgtttctttagccgtttcgataatcatgtttttctctcatcacaagttacgtttaaaaatttctgccacttcgagaagttcttctttagtagctgtgtcggtttgtattttatatcgaatttctttaaagcgttctttaaaggactctgctgattcgatatcaaaaaatctttggataagccggaattcccggagcactgctttatcaaaaagttccaagtccacgttatatgttctcataatattctcttcagtagattcctagggcgctattactaaagaccatataatctatcatcttatgtgtaatagtgcctcaggctattcaggatttacgctgtgaagattttatcccacatcgcaacaaccgcatctcggttatacttcttccatactgcttcagcacgtttaactcgagcttcgtatgtgtcagtgaattctaatacagcttttatgtaaagcgcaactacttcttttttaggagtagaggaatcaatttctacacgcacagtatctgggtcgtattcaaatgtcgcatgaggataatccttaaaaactaactggattacagggacacctttagagatggcttcaatagaactattctctaccgtacctgtgtcaggacacgtattaataagtgctttagctgttttaagacgttccataatttcactatgtggagcatcaataataacaggatatttagctggtggtgcccatttactaggacagtatcctgcaccattttcgcctagtgctttaatcgcttcaagagcaacatcagtacgacgcattttagtgtcatagcgttgtgcactaataatcagatcagtcgccggaagaacttcaggtttctcattcaaacaaataaccggataatcttcggcttcaaacaacggatttgctcgccaataatcataatcgattttgtcagtcagacctgaagtcatataacaatatttgcgttcaaattcacggaaggctttagtaggagcataactcttaccaccattcttatgaatttgaatagtctggtcccaaatttgaacaatgccacgagataccggttcaaatggtgttgccataaaattcttatgaactttagagagacctgcgtctttaattgcctgaacggttagtttagtcggttccatagtaacaacaaaatcgtattcatggatgccggctagttcaacaatcttacgagccatagtataactcatacctagactgaatttagtcagatgaccaacaggatgatgattaaccttccaatcaccaaatgtgtcattatcaaagccaatataatcaatatcagcaccgatggacacaagatatttcaacacatttaaatgtactgcttcaagaccaccttgtacacggtcagggttaaatgggactgcgcgagatgggataaacataactttcataattaagccttattaaaattaaaatgaagctcccgaaggagcttaggacatccattctttacgaagttctgaatcatcacccatcaacatttcaaagagttctttccaattttcaggaagtttaactacgtcgtacacagggttctgaatcattttacgatattctgacttttcaagggagcctaatcccttgatgtatcgaatactatgcttaggcagtgtatctttagcttcttcatactcagctacagtataaaaccatttttgagttttgccaatttgtgcaataattacaggcgttttaacaaagcgaatacgtccttgttcaaacaattcaggccaattactaaagaaagcaagcaaagccggataaatacttccaaggccgtcatgatcggcatcggtcataattgcaatattacgatagttcgtattctctgccttttcaccaagaataagacctgtgatagcacagatatcaaagagctctttgttcttcatcatatcagcatatgacataccccagctattcatcaccttaccacgtaatgggaatccgccgtgtagttcacggtcacgaacatcaatgagatatccaattgccgaatcaccttctgttaagaacaatgtcgtatctgcatctttaccgcattggttagctttaatatgcttatgaaccttagctttagttgcctttttagctgctttagtttctgcagccttttctgctgccaatttacgagctaatgctgcttcaacaataggcataatcaaggcttcgtttttaagaagtgcctgagcaattttcttagcatctaattggatatgattacgaatatcaccatacgttgacgttaaacgttctttagtctgagaatcaaaacgcatgttgctcatatctctaataaacatcaacattgtgagacattctttaacacgagctttagtgacttcaatacccttatatttctttttaataccaggcaaaagatgttcgcagatatcatccattacacattcaacatgatgaccaccatttttagtatggatgttattcacataagttaaatgacggaagccatctggtgatgttgtgaatgctatagagactttatcattttcttgaatgatgttatcttcgccaaattgtttagcaaatcgtttaaaattaccatcaacctttttaccattaaatgtgaacttgatatcaggataaacgactgccaatgtttgaagtcggtctaaagtaatatctaaataaatttgagataaattatgctcttcaaatgaagtgaaatcaggagtgaagattactttagttcctttacctttagatttcttagaagaccatgatttgttttccattccgtttgaacagttaacagtgatttcattttcgccatctgacgtgatgcctgtaaacaacgtagagaagatattagttaaactactcccgacgccgttcataccaccggtcttgcgttcagagtcatcgccaaagttaccaccagcctttggaatagtccaggctgctacaggcccaggaatttgttcacccgtttggtcggtaactaaaccttgaggaataccacgtccgttatcttccaccgaaacttgattatttttaatttgcacatcaattttatttgcaaacttaaatgatgtacgaatagcttcatcaaccgagttgtcaataatctcatcgattaatttaaccagaccaaggaacatttcaactggtgaataattaccaaccaaaaacggctcgtgggcttctttagcagaaagaaccaatatacataccatacggtttcttaataatggttctacatctgacaataccctaatttcatttttaatcatgttgtctcctcgttatgaaggtattctatcatccgaaatctaaagcaaaaagggccgaagcccttatttaaatttaattttctgaagtgcatcaattgcagccaaacgcccttgttcacttttaactgtaatgaccacatcgcctgatacgatcaccgaaccatcaacaaattctatagagccttttttgaaatcgacagctgtatctggttccggaacttcttcaaagaatttaaattctgcaccataaagcagaatatcaccttgcatactaatgattgtacgtccaggtccatcggtttcagcggcaatcattgaaacaccgtaaccaatcatctcttctacaataaaatctcttgataataaaactgtatgcagagtagtgttaagacgtttaccagttgtattaagaattctcaagaaattatcttcttgacctttgataatacgatatttcttaccaacttcaaaacctttaaaagccataattaacccttcttaagtaagtcgtaaaaaccaccgttcacatgtttaggagcagaaacccgacgagtagacagacgatgacattcagggcaaacatcgttttctcgttcagaaattcttttaattttttcatattcatgaccacaatcttcagattggcatttatagtcgtataacggcattattattccttaaaatatgctttcaacattcgatacaaagaccacgcctggtcgttattttcgatagtaatcgtcatcacaggaaattcagacaattcgtcaagttcaccagaatcttgctcttcggacgcttgatatggatttccaacttcgtcaaagaactctgcttcattcgtggagagccagataaagttttcatcaaggatatcaccgcctgttgcgtatccaaccatgccagtagatgtcacaattttagtaggacgtccaagatggtcaacatctaatactttaaatggttccatgccaagacgtcgtgcgtaaatcccattatcagtgtggtctttaataaactcttcttgggcacgtttatctttaaattggtaccatgagttaacgctgaatttattagccattagtaagtttccttccaataagttgtaccattttcagtgatttcacggaagataccatagataggcatttcatcaccgagtttttcgtaaacataaaccacttcagtgtagcataaaaattcagtccagtttttctgtacaacaactaaatcaggattaaacagaacatcttcaaactcgtcacgattcgattcagtggttacatttttaataatttgacgtttcataatattctcctcttgttttgataggtctatagtatcatagaccatagttgttgtacatcattttagcaaaataaaatcaacttgttctgctaacgaacgtctgaacattaattgacaacttccgagtatgaaatcaagtgcttcatagaccgcgatgtagtatcctttagctttgaagagttcaacatccacctggtcatcaaaccatgcataaaccgcgtcaacactttcaaatccaaaatagaactcttgagcccaatcttcgttcaattcaaatgtgtgctcaattctatagtatcttaagatattttgttcaaggagtttgtcttcatttactgtaggacgattagggacattatagttgtcgccgtgatggtagaagttacctgagattattccatgtttatcaaggaattcccatgtttcttcagagttgtcagtgccagaccaaccgtaaggtgagcgaggttctttattccaagaggtttcccaaattctgacggctttaccgtcttcgatagcaattcctggtaatgattcacgttgagtacaaaaactacgttctacgcggtaaactaacatattattctcctctggttgatatgggttataatatcaaaaccagaggagaagtaaacaactttatgcgaaagcagctgggctatattttttaatttggaattcaggaactaccatgaactgtccagcgaaaacgatgttataaagcttaacaccatcttctacccaacggtcgctaataaaaccagcaatttgcttagttttccatggcgttccatcagttgccgcagcaatagtgaattcatggtctttttcaacagaaactgatctgcatagtccccatttgaacgctttttcttctggttcaatgaattggcttttaacgtaaccaatgttaccatcggcgtcacgaactttaacttcattacgtccaaaaaccggatcgctcacagaaagaacttcaaccaacttcccggcaactttagagcgagaagcatctgatacgtgtacataatcaccaatagagagatttgcaatattcataataattccttaagctttacgaggagacacatagcgagtgatttcagattctttaacaactcggaagtcacctaagaatacgatattgtataacttttcaccatcttcaacccattggtcgctaatgaagccacacatggtatcagttgtgcttggataaccgtattcgtcgatgtaatcaaattctttatcggtaataaattcaacacctttgcaaagggcccatttaaactgtacattaggttcagtagaagcaaaatgagcgctcacaggagtttccaaaaatttaggacttacgtaagcgtaccgagtttcagttttcccagaactaggaatgattcgaactttaacttctttaacacgaccagtaccattagtacgaagtcctaccacttcaactagacgacctgcagctttagaacgagatgcagttgatacacgcttaatttcaccaatagtaatcataatttttctctctttgttgttaagatttatactccatccgtccttggatgtacaacattaattaaggatattaaccacagcactacgtggaactacactaaaatcacctgcatgaacaacgttcagaagttcaacaaccgtcttcaatccactgatcagttacccatccactcactggacctgcgaaacggacgtcgaattgaaacagctttacacaacaaatcagtaggctcaataggcttaatcagagtaccgtatatacaagcgatatccatatcaatacagatgtctttaacgggttctacttcttcaatcaacagttcaaagtctgtgcttggaagggcggtagtagaaattgtaccatatgaatttttaatttctaagaataaccaagggccttcagcttgtttgatgaagttaacaatagtgaaactattaccttgagtggcgcctaaaatttcacaaaacttttcataagctcgcactgaagcaccgtaccagttaatttgtttttcgtctttcaggatgtaagtagccgtagtattgatattcataatgttttcctgtttggtataagatagaaagattatactccaaccatccttggttgtaaactgttttatcgctgttttacacttaacgggtcaggattctcagggacatcttcaaggccaagcgcataacgctgagcatattttaacatcaaaatatctttagcacaatcatgaatactatcatgggcaacgaatccttttagcgtacccatcggtaatggacacatacttaatcctcgtgtcaacgagtaagcttcgattgctgtacgaatatcgcgttgagcccagaatttaaccggttctaatttatcggtatcaatctctggttcaagaacaccttcatcacgatagaggtcacgaatcaaatcgaccaagatcgggaagtcaaagctcataccacggcaccacatctgtgatttccattggtcaactttattagctcgacaataatctaaaaagattttaatgccttcaagcgtagtgacatcgtcttcagacggggccaagtttttacgtgcttcagccgattgttctttccaccatttcatagtggatttagcgaaaactcgcttccctttctgagaagctaaattaaatttaattcgcttacctcgttgaacaagttcttcaaatgattcaacaacttcagggtcggaattatatgcaataaccgcaaggtcaataacagccgcttttgatgtattgccgaatgtttcaaaatctataataacatcagtgctcataattttctctcaaataaaatggacgtcaaaacgaccacgagttgtgccgacatacaataactgtttagctaattctgaatcagcataatggatacacggtgtataaacaaaggccgtgtcaacagacataccctgggccttatggaaggttgatactggtagtgccttcaccttagtgaacatacgtttagcatcccagaattcgctccatggagctttaccacctttattccagaatttgtatgtttctgcggtcttagccaaaaacaaattgaatttataaagctcttcttcggaagaaataacctttatatcctcgcggatgtattcttcatcatccccatatgtttctactgtaagattccaatatcgtatcatatactcgcccgaaacaccacgtgctttaacgaatgtagacgtttctacagcatctcgaatacgaacgaattgcccgttattgaaaagcatttcggtcatatttttaccatctagcttgtacgtcttagtaaatggctcttgtagaacaatgacttcgtctttaataaatggtttttctgtttcaagaagttttcggcgaataattgaatttaacttgtccactgacttatttgtgaatgccatcatccgattttcgaaaaggtcttcaggagttttaacgacattaaaataattcatcatatatgatttaaggtcggtatatccatgaacaccatgcccgtcaactactttatcataaatccatttgccattacgaatatcggtcgcaacatcaataattggtgcattgctacgtttaacttctgtaaggtcgcattgcacgaagtctttgtgagtgaagaaaggacttagatatgcagtggattcgcctgggtctaccggtcgaatctgacatcggtcgccaattccaattactgtgcaccatttagggatactagctaacattattttaaacagagaacggtcgcacattgacgcttcatcaaataacagtacacgacacaaggctaagtcgggaacctttttctgttcaaacaatacgttttcttcgtatgtagttgggttgattttaagaatgctatgaatagtcgatgcttcttgaccagcaagtttgcttagaacctttttagcggcatgtgttggtgctgctaaaataatacctgattctccagaagaaataagagcttcaacgataaatctagtaagggttgttttacctgtaccggcaggcccattaatagttacgtgatgtttcttttctttaatagctttcataacaacgttgaaggcgtttttctggccttcagtcaaatcatcaaatgtcatcgtaaagtccctgcaattggaatactaacaatacggcctgtgtccaggattcgttgatacaatctttgcgtctccgcatctagtttaacgtgtttcatttcaagcttattaaaccagaacttacgcggagtttcgaccattcttagaactcccatttttaaatctgttttatactgtgttttcaaagtatcgaaaactttatctgcaatatcctttctaaaaaatactgcaggacgatgctcatcaagaggaaccgggacagtaaatccttccatatctcgataaactattgcatatacataaaccataattaacctttaatcagttggaataatgatgcgctaagtggtaagccacgtttcaattttaatttaccaatgaaaccaatcttttcaaaacgttgcagaccttggataactttatcatatgtatcgaaaagcgattcagcgtcagttaatttagttttagttttccagtcagagcctttaagaagaacgttgagtttagtaagttcatggccttctgcttgatgtgagccattaatgcgtgctttcaaagcaacaattctaagtttagattcgttagataaaggttgatttttcatcatgtttgccatatgcttaacacggttttcacgttttgctcggatttttaaaatagtaccataaacctttttaatttgggcccatttcttctcgtcgagattaagtttctctactttacgagcagaaggattagcgatacgtcttgcaatagcatcacgtttctcaataagttcttctaatgttaaatcagaacgagccgtgttatattttttcttaactgggataacattacctttaatgtagcctatatcattattaaaacgttctaaggataatttctcaccttcaacagagttattgaaagattcacctgagtaagcgcagaccttttgatcaagaatgtttttaaggtaattaaagtctaagttaaaatccttagagcgtctcttcgcagaagctctggtgtggtcaagacgacgattgattttgttaattttattatttgataacataatattttcctctgtcttacggacgttaaggtcatttagctgataagtctataatatcatgccctcaggtagtgtacactcttttttcataaaatgctttaattttttatgtgttataatggttctgagttccatccggttattccaattcagtcagtaactgacaatagacagattccagattgtataatgtccatcttgaataatagaatctacacgcagtgtagtccctatagggagcataaattcacattcgtcagatataagtctagcgttagaccgtcttgtcgcttcagggaaagctccattgaactcacaagatggcgcagccagaatcatgttaagcatatgttcacggaagttgaaagcaaatggtgcatctttgatgcagaacatattaaatgttccgtaaaaattatacgaagcaaagttacgtgctacaccgaacactggactgaagctcattactctgtcaaatttaataatactaccaatgcctttatcatcaagtgtggccatagttttcttagagattccacgatacattgtctcaggaacagaagacgaccaatttctacgaacaattgcacttaaatcttgttggatgctatcaggcttgttttccatacactgccatagtacactttgttcaatgtcactgaattgctcatcgattttgtactgaagcatatcttgataatccgggcattgagcacgacgaaccatttcttcaatttcacactcgttatacggcataaacatttaggtttctcctatggttgataaaggtatagtatcatcatcggaagagtttgtacactaaaaattcaacattttcaaatgaatgattttgtataatctagataaagggtcatattctaagtcttcaatttccacaatctcaaatctagagatacctgagaccatgtactcttgttcagattcaatcatatctaggacatcaacacgtgtttcttccataacatgcttagggttctttccggcaagtacaatgttaatcatgttttggtagtaatcaaaaatgaatggagcattcctgagactaagaatagtgtacgtctgatattcccatctcccggagaattgacgagctgtactgaaatcagttgtgaacgatgttactcgtccaggagaccaatggcatccaacagaaagaagtgaaagacgttctacttcttctggagttacaccacggtagagttctactggtactgtagaagtcatatgcttacgaacaagatggtctaattcatagtggaaatccgggtcttccttagaatcggtgcaagcccagagaatgttttgttcttggcgggtgaatttgctatcaatcagatttgttaggtattcgcgttcttgaagttcagattgacatgtcatgatagacctccatttaaagataagcctatcataacatgagaggagggaatgtaaactactttttaagctttcctactaaaggtccatcaggaccgggttgttctaacatgaataaggacgctttaaaaagcaatgtcaaccctttcaccattcgataccatgtctcaaagtctttttccttgatttccagtaagaatttctctttcaatttctctttcatttccaaggactccatggtggagggtcgtcataataagaggcaaggtctttcagggcttcgacaggcaaactaaagccgtgtcgttgtataatactatctagttcatcaacaagttcactacgatgcactttaggagcctcaacttcaggctcgtcaaacatactcataaggtccatattattcacctaaataaaaactaggctgctcggagaatgtttctagcgctacaccttttgtcttaaaaaatttccaaatagctcgttgcaaatggattaaatctgctaatgatgtaataaagtattttttggcaaaatacttatggtctcgcttttcaaacaaatctaaacgcttttctggattcacataaacggcattttccgtagattcataacctaagtcctttatgccttcttcaagactaaacggagaatttttagaatgagtaatagctccaactcgctctacacgaatttttgtaacctttaggaatctgcaatttgcagaattcttctacgatatattgcggattatttagacttttgttaatgagaatagctatttctagtggagtcttatcttccactggtatatgtttaaatgacttggcttcaagcaaatacattttaaataacatagcatccattataatttcctcgatggttcacccatataaagttttacaatacgttcgccttcatcttcgacgagcttttcttcatgtttctggagttctttgaccattttctcttcaaaaacatctaaccaatcttctggtccgactccatcattcaagcttttaaaccattttactactctgttcattcacagctccctgagcttgaaccacaatcagaataacttgacccagaatcaccggaccaagacgatacgtaagaatgattataacttgaagagcttgaagcattcgcctggtttgtttttagacgaacaacttcttccatcattccatcaccaatatattcccaacttttttgatgtgtatcaggaatacgaatcatcccttcgccgggtttaacaacaaacaacttgttgagcatcggaagcattaattgttgcgtcgaacaaaacgaacaccaccatcatccccaacggatttgggcattaaatttgacgtcttcaccatccatcatgaatgagtgtacgagtacgtcatcataatatccaagaccgtatttcaacgaaacttcttgagcaatcaaagcacctaatgtgttattaggtttaatccaacgatttaacatattgttctcctcttgagtaagtaagaatatcttaacatagtttttagtggttgtaaactctagaaacgaaaaaaggaatcccgaaggattccttaaattatttaaccacttactggtgtaggggtaaacattgcagcgttcttagtacgccaatctgctgcgtcagtcaccacagtagtgtaagcagctttttcagatgggaaagtctgataatgagcatcagcaatccgatgttcgtttgaataaatctcaaacggtacagaaacttccatacctttaacttctttaccttcaccagcaggatgcgtaaaggttttgatgtttacataaccacccataattaactcctttgttgtttaattacaggtgtatttatatcaataatcgtcgtagaaatcactcaaaacatcgtatagctctttctcattattgcagattagcgacttaattgcgtcagggtgagactccagtgcacaaagctatattggccgcgtgatgagaatgtttctcagattcatatcatcattagggatggcaataaccaatcgggtctttctcgtaaaggtcgttcattagtaacctcggtcttggcgagcgaagttttcagcattcttcaggtaatacagtttgaagatttcttcagcagtgagtccaagaccctggaacatattcagaacaaagtgcagaatatcaatcatttcgaatttaatttcgagctggtcttcaggagacagttcatcgatacgacgatttcgatattcagcatgttgtgccttccacggcttccacacagaagaggcagctttctcgccgttgctcataccgccaagtgaagtcagcagttcacgaaattcatcatcaatataatctttctgattacgcaaccaatcaacaacatcgccagcagtagccaattcatcaggatgtttgttatgttcaggcttgtcatttgctaagcgaacctgtaaagatttctgcatatcaagcattacctgcagtgggtctttatcttcgtgaatcagagcattaaaataagcttcttctgctttatcaacaccagaaataagttgtgaacattcgttaaagtgtgccattatttttcctttcaattcagtataagagagttaattctaacattaattttataaagcgtaataaataataggtaactaaggagatattatgtttaaacttccatcgttaatcaacgctattaaaggcaataaaaagaaaactgctatcgctgcaatagttgtaggtggtattatttcatggaacttcgggattgcaccattgttagttgcccatggtattatagttccttctgttccattggatactgttgttgacctagcttttgctgttatagggcttgtttaaatcttcgaataacgagataatctcattttagcatgcaacccacttgaaatattctgtttcatatattctaaaatttcttgtggtgttgcattttctttcattaccatatcattcacatcctttgaactccatggagctcggtcccagaacatgacacgttcgcctgcatcaactaatcgcttcatgcgagctatagtatccggatgcctaggttcattatccattacccatacccgacgttctttaaatggtaccacatctaaatctatcgagccgcctgtaatagcgattgcattaggtatgaataaactatcaatagggccttccattacccagacgtctccttccttaacacgttcaacaccataaatttttgttgcagactcaaacgctttaatagtgatatatttctgaggagcatctttacgaagtgcacgtccttggaatgactcggccttcccgtctttattaaaaataggaatcactaaacgtggttcgggaatctctttcttatacgtaccaggttgaatcttgttgaccaatttgggccattctaatgtgaaccataatctgttccatgattctttaggaatacaccgagacttaacatatttcacaataggatgctcttcaggcaacttgtccagacgagaacaagacggcaaagaatttatagtctttttctctggctctggcttagcttcaggaaccttttcaatctttggttccattctagctttttctttacgaacttccattagatattcgcgataaagctcttcatcatactcctttaagtatccggaaattgtattgtggtattgacagttatagcaatgtacattaccaggagtaccgccataataccaaccgcgagctttcattgcatctgtctgggagtcgccacaaactggacaacgaaacgttaatttaaatgtgcttgaattattgatttgtctaaaacgagggaggtgagaaaacgcacgataagcaaattcattatctatccattcagccatagtattctccagaggccttattaatttaaggccatcatatcacaacttattaatatttactttaattcgctttcttttcttggaaggaatttgttctggacctttatttacgactgcacctgtagttgttcctgatgcaatagcttgaggactgccgcctgaatcaccagcaaccatatcctcaaataaagggagttctttaaatatttctttctgttgttcttctgtaatgttatagcgtgaagctacagcactccaggcggacatcattgaggccattccattaagacctggaacagtgctcatcattcgcttcattgaacgaactgaagcatgaaaaggtgtataagccgcttctcttcaggagtggaaggacgtttaagaacacttccacgttcatcgatgattttggcttcgtatgctttccattcggtaaaaggtttttgcattagtcgaataaacttatatgcataaacagaatctattgcagtgttaataatacccataggtacctcctgagtatatttaatcaattacaaagattgctttgtcaccatttatatctgtgacttcatatgtggtgccttcatactgtggaatattccaaattacaccgtcattagcttttacgctaatatggcattggtgttttgaaacaacttcataatcttcaaaacttgtaaaaacactaattttagaaccagtgcaaattgcagtagtcattttaacctcgattcataaatgcattaaatatttggtcatcaacagaaatttctaattcgacttcaattgcttcagccttttcttcaggtggtaattcgtatccacacactacaattttttcatcgatatcaaaatatacagaagcaatacgattaatgttattttcagttaagtccaaatcaacatcaacatctttttggcttacacttagaggataactaatacgggttattttattatctttaacaaagagtccaccaacatactctgtactacgtttgaagtttacacgtttccgaattgaaagatatgatgcatctttaccgtgagctcggctcataggacataatgaatagctagaataagagatgtcaaatcctacaccttcaatatgagccaacgtgtcatgattaaaccaattataatcatatgccaaatccattatattgtaatatgtgaaaggcacaggattaacatcatatgttgtacctttaaaatctgcccaggcaacgatttcgttatctttaacaattacaaaaattacaccgatatggtatccgttattattttcattcggcgttatattataacattgtgcattaggaaatttaccatatttaaatggcgcgtttttgtgcatgtaataaatcatattattcacctgtgatttcggttatgatatctttgttatcgaaattagggtcacaatacaaaacatagttgtactgcatgataccgccagacttaagttgttcaacaactttattaaccatattaggacggtctcgtttagtgatgttcatgatatcagagaagatttgttgttcaacatcttcttgatttgcagtcattgaccactcacagaggtctttatcataacctgccgtaactggagccggtgcacatgatactgcaagtaagattgctgccaatgataactttttcattttaactccttagttgatttgataggactactatactatagtccatctataatgtaaacaagtttattctttttcgcgaataataattacttgttgaggctgctgagccgatttcttttcggcaacgatagaccaaattaaagttccaatccaaccaaccatcgtccagttaaagagtaaagatacaaagaagattgctgttgtgctttttgtgccacgaataagtgcgattacccaaggcaacatgtaaatgatgattgaaccaatacctgcgattaaaactgctactgaactagctacgaataattccatgttaatttcctcttgatttgttatgtttatagtatcttgttttaactttggtgtaaaccaattaattaaatttgtttaaacgttcaatacactggacgtagttattcgcgatttgtttctgggtaggctctttaccagttgtttcaacatagcgaatgaacgcgatttcagtagcctgtaagcaatgttctttaacgcgttgttcttttgacaatgctacagtatcagaatcacgataacgttgagcatgggcatcagcttgaatcattcgattacctacagtaaccgggtcttccacttcaactttaggttggttgtactgtttaacattcggattgtaaatcagttggccaacgttattagggataaagccatgggcaccacatccagttaatccgaataccattgctaaagcgattaattttttcatttcaatttcctctgtagttgatagaaagatagtaacacagtatgtggtgcttgtaaacagctattttaaacttttgcgaaatttgcgtttttcttgacgaatctgtcgtttagtcggacgtacagcaaatttaacgaagtccactttgccgtgtggaaacttttcagatgcttcacagtccatcattagttcccatccttccagaataagagctttccattgtgtagttgatgcaaattcgtatgttgatggtttaaacacagttgaatacatattatcctctgaaatcagcttcaaaaactttctcgtcattaataaatgctttaactaatgcattgttcacttcagcaagttgtaccgtaacccactcgatttcttcgcgatcacctgataacatgatatctttagtgaacatctcaccgcttttaaaccaaccgataaaagtaactttagttaatttgctcatatttcctcgcaaaatgcccattcagcgtgataaactgtagcacctttagtattattcatttgaactacgtctaccggagaaattactcgatagagacgtggttcacctccataagagcgtgctgctcgtcctgcataaatctttgctaaaccgatatcttcagtaaagaatacacgatccaagtttttcttacgtccagtttcagacagaactcctgtttcctcaggaggacaaagcatgttttcgatgttagctgaactacttgaaccgtgataaaaaatcttaaattctgctttacaatcgatggttttcattttgttctccagtaggtgataggtctataatacacaactactggagaagtaaacttaaaaacgtaatttagatatatctgcgttgatttcgttttggtttgcgtcgtatgcaattaaacgaaccgctttagatgggtcattcaatgcatagaaatgatggaacattgctcgaacgatatcaccatttacgagttctacctggataggagaacctttttcgagttggaaatgttcataagctttgatggttcgcagataatcaagtttttgatttccggctccaacaatttgtacgatacgtttgcccatgttttccatacgagatacaatagttttaggagcaagaataacgtaggttgccagcggagaaactacttcaacagttgtgttttcggtgattgcagtaaaaattgcttgagacatattcataatgttttcctcttggttggtgtaagtacatcatatcatgtctagaggaagatgtaaaccccgaaaggagaccgaagtctcctttttattaaaattttaactcattggctaagctatctaggtcagcacgtgttgctttggctttacctacgcgttccgtacgattcacctctgcctgacgcatctgagcacctgcgttttcatttactgtgttaggtgtgttcatgccttcttgctcaatctcaacccatttctgattgcctttacgtacacccatcaggaatttattccacttattcttatcgccgtatcgtgatttgatttgcttgataagttgttgttcagcttgtgcaagttcttcggtttcaattacagccaacatgaaatctgccgttgctggtaaacctgctgattctgcgatatcactcatgttcatgtctgaagcatcccatgctgcacgtcctacttgagctgcagtccatagaactgtttcagattctactgctaatgcacgaagttcttctgcgatagctttaactaatgtgtagctattttcagtgtaaactctgatacgacaagacccacaaatacctaagtaatcaaccatgattacagatggcacaaagttcttcttaagttttaactcattaagcaatgcacggaatgtattagcattagctccaccagtaggatactgtttaactactaaacgtcctaatgttgtttttgaacgccatttttccatcttggctttatattcagcataagatacgttaccatcatcaatatcatcaagtgatacgtcaagcatgtttgcatctatacgcttagcgcaaacttcttcagccatttccatagaaatataaagaacgttatgacctgtttgaagataatctgcagcaagtgaacaaaggcctaaagatttaccgacgttaacaccagccattaaaacgtttagtgtaccggtttcagcaccacctttggttattttattcaaaatgtttaatttgaacgggaccttacgtgctttatttagataagaaagccagcgtgcttcgtagtcttccatccagtcatgtccaacataactatcgaacgaaattgaaagtgcttgacgcataatatcaggaatagctcctacgtcaggcattttcttgttacgttgttctggaggtagttcagcattagactgaatttcaatgattttggacgtagcattatacatcgctttttgctggacatatttctcagtttctttaaccaaccattcgtggtcttcaggagtatcagccaatttttcaattaggtctgaagttcctttatattcggcttcagttaaagaactgttatctaaagccacctttaatgcattgatagatggcattgcattatattcgttaacgtggctctttataattttaaagacgttttttgccggtccacgctcaaagtaatcagaatccatataaggccagaccttagaaaaataagcctggtcatatactagatgagacaaaataatttctaccacgataactccttaaaagaatttaaattttttcttggcccgttcattaaaagcttgttgtacttgcattgtaacacatttttcaacatgtggtgcaagttctgccttttctgtcctggtcaagaactgcaaagtccatttcgattttaccatcaacccagtgctagttttgtaatatagacttatatgatgggaaccgtcttcaagtgtaatcagaatctcttgaatgacattttccattgccgaacggataattttaagagattcattaaacactcgttctttgcgaatgtcttccccttccgaagaaggggattcatcaacgatttctagatttaaatcatcgagattattcatcgaaatcttccatttcgtcaaggtcgttttctatatctgctgcagacggagcatcagaagttttaaccggaactttagttgttgctttgcaattaataaggtcgttaacagcgtcatcaacttctttaatagaagagatagcacctagtttatatttagtttcaattgcatctcggaaaggtttgtgtttaaacaacggtccccagaattctacacaatcagtagctttagcacgccacgatttctcttcacgaatcatttcacctgtttcttcgtcaaggaattcacgagcataccacccggctttaggcttaaccacaaaaccgatttcagttgccatttctaacaagccactgaatgggtcgataccaccatcaaaattaaccgtgattgggaaagtagatttttctttaacggtgcgagatttttctgctttcaacgtgaagtcataaccggtcaattctgtaccttctttaacctgacgtttagagataaaaaataccgtgttggcagaataaagaatacctgtaccaccacccataatctctttaggatacaatccgccaatttccattgctgtatggttgattgcaacacatggaatatctttaatagtcagataaggagtcacaatgcggaacagagatttaagtgccttagcacgagacatatcacctacaactttctcgttcaatgcatcttcagtttctttcttagacgcagtattaccaatcgagtcaataaagataataactttatcaccgcgttcaatagcgtcaagctgattagtcatatcaactttaagttgttcgacagattgaatcggagtatgaactacacggtctaaatcaacacccattgaacgaaaataagattctgaagcaccgaattctgagtcataaaacaaacagattgcatctttatatttcttcatatacgctgcaaccatagttagtccaaacaacgttttaaagtgtttagaaggagcagcaaaaatagttaagcctgattgcaaccctgcattcagtgcaccacctaatgcaatattcaacatcggaatacgagtagggacttcatcgcgattattaaacagcttagacttagtcaagtctgcagtcattttagaagtagaagctttaatcagacgagattttaaatcagacattgtatttttccataggcatcattatattttactcatgtttaaaagataagatgattatatactaagggttatacagcatttaaaactttaaatggctcttaacgagcccatttgatgatttctgtaatcaaatcattacgttcgcttgcattaaatcctataactttgttagcaccatcatgattaagtaattgatacgtttggatttcgttatgaattgcaaactcttcaaaatgtgaaatgactgtattaaaaccgaatgaagacaaagtaataaggtcgtcttcaaaactttcagtcatttcgttacgtgttaaaataattgtgaacacatcatggttttggcaaagacgaacataatcctgttcataaacgtcaagaaccgagtccgcatcttgtcgaatacgtccataaacccagttactaatatatccacgatctaacagataaatcttagtagggtctaaataattcaacatcgtttcgaaacagccaacttcatttcgagacttaacatcaaaacgtccatcaactgttcgtttagggaaatcaatctttacatatctttcactaatttccattatgtcattaatgaaagttgttttaccagcattatccgggccatctactaaaataattttagccattttattcctcgattacgacatcttcatatttaggtatattatacggcgaagaaattaaagcgttaaagtagatgaactcaccaagacctggatggaatacttcttcaggattttcgaaatattgaatcttcggacgtcctttaagaatttgatagtactcagttttagttggtttaaaaattcgaatcagcgcttcttcaggatacttatttctgtcgaagctattatttggatcggttatataaagcggttggcctaattgaattgcacattcaaccacttgttcaaaacgatagcacgggtcactaattcgaaatggatgaaaaataccatctagatgaataggagccaaatcacactacaagacgctgcatgatggaaggacgtataactttctgcgttacgataatcttattaccatctgcacctgcgttaaccagcacttctttttgacgttcattcaacacagtagtttgaagtgaacgattaaccgacaacatatcggtttttaagaattcgtcaatataaaaacgtggtttattagggtctgcagtgatattgaaaatgaattccacatcaaaagcgccgtcatatccagtgatatctgtgattagaaaatcacaatcataataagcaattaatgaatcaaccacaaattcattttcagaccagaaatatttacgagtgttatacgcgttatctttataccataatggaacaaacttaaattccgggaaaagacgttcgcattctttaatatcagatgcattacgtggatatgtaatcacatcacctggattagcacggtgcaaatgaagttggaagttgccatccttaaggatagaatactgtccagtttcataagaccgcatactcaagataggtacgcggaaaatagccattagtcaaggaatcctttaacataatcaaaatcacgttcaaacacatgggcacttaccatggtatgagtataatcaccaacttctacaccacattcgttagcgatataatgaagtaattttccttggagataaaaatccaactgcataacaacagcacagttctgggaacgcatatggcagtgggtataaagcttaccatcacgaatataataagtcactgagtcagtacatggatattcaagcgtttcgtccgaatcaagcaaagcctgatcagaactttctagaatttggaacacaactcttcgggagttaggcttctctttaagttcttttagaagagctggtaattgggccgcaatgcgaggaccgtagaaagtgttgaagtttgcaggcaaagcgtctgatttaggtttagaaataaatttagcaacgttaggatatgccttaaacgcttcttctgcatcagtaccaccagaaatcataaacttccagaagtcttcggcatattcataagagatgcggttaatacgtgggtcggtcattttgaatgatgatggagtgtcaacaactactgtcatagacccaatttcattacaacgtccaatacgagaatcagttacgaattccgggttttctaaaatttcacgattgactgctttaaatgcggtttgaaaatctgcggctttgatatatttcattgtgttatgttttcccatgtttacctcaatacaatttattatatactcaattcataaagcttatttgaatttcttagcgatgttgatataacgtaaagcttcagcatcgatatttccaagaacactatgaagaaatgcatcagcgtagtattccaattgaacaggttctttaatcactttagccgctttagtttcaaacaggcccatcagggcctttttaagaatttgttcgttgctgttaattttcatagtcaaaatctcttcattaagttggtggttaaaagtttttctagaaatcattctgggtacctcaaagcgtcatcagagttagttacatcaataatagatatagaattttctgataacccatttttagataactgacgtttataatatctttcacaatatgtacacgtcgtcccgcagatttcattagcacaatcgaaatctggatgtctgaaccaccttttttctaaaaagccatctaacaaagaggtttcaatatttactgtatgtgaaaactcagtttcgttttcaagagtgaaaatagtctctaaaggcttccacagttctaacaaattaccttcaaacttttcagaagcgtatgcttcaagaactttcaaaatgtagtctgtgctacctgtacgtcctgaaactttgaattgagtgataccaatatcattataaagtttcaaatcttgaggacgaacaaaacgagttctcaaccagttaaatgggtctgtatcacgagctttaatacagtgctgcataggatatccgtttaaggatttagcatcatcagctgtaacatcagtactatggaaaatatagcaagagtcacgatagctacaatgtgttgtataccctttaccagcattagaacagaactcatttacaagaacttcaaatattatattgttcttattgcaaaactctgctgcacgcttcaggaaagaaactgaacggtttttatgaattccacagcagacctttttgatattatattggtcatgcaagtatttgatttgagttacagcatcgacatgtagaattgttgaaacttcaatctcaatgtctttattgacttcacgaacaatttccataacaacagggttagcgatagtaatacgccatacgcctattgaccaaagatactgaacataatcctgaatagctttcttcttccactcaactagttctctttttgaaccaggatttatcgtgttgagtgtatagttaaagcaaatacctaattcgttacaacgtttaacgtaatcttctaacatctttttgtcaacgtcaggaagcctaaaatcaggtctggctgctacaaaagccatttctcttgtagagccgtatacttcgtttatcaagctattaggataagttttattgagctctacgattttatcaagaagagctaaatcaaaattcgttccgattttaaaagtattcattttttgcatctcgcgttaattgatgcgatggtttttgcaggtcttacttaaattattatagattcggtttatatgatttaaatgtttcgaattcgcctttattcataagagctttgaattcgtcaggacgcatagctttgtcgtcgataatccaatcatatactggtttatgtgttagcaaattatggtacttcaagccaatgtttgccaagttctgaatcagacttgggagaatgtcaattgctatacgtccaggacctactgacttcataccgcgagcagtgtaaagcgttatggtatgccctgcatcatacagagcattaatggcagacaccatttcgacgtctggtttgaagttcacgtaatcacgattgttattccactctgttatacaatcatcgacatcaaaacaaagattaagcatgttttctacatggtgcattagattcgttcccattgatgagtgatatcgccaccgattggacgataagaaacaccagtttctttatcggttagtacccatttaccaggattttttgtaatcagagtagccgttacaggttctgctacgtcataactaatagagccgtcttgaagtacacggcccatgttacgtaattgcttagtcagaagttccatacctttataatacgcggctaccgctttaagtggattattcttgaaataaccacctaatgcaatccagataattgctacagccaaatgatgatactcgttaaacgaactcatctttccatatttgtaaactaatggattgatgttaatagtcacattacaagttgtttcgtcaatagtaaactgtccccaggtcggattagcgttgaattcatcataacctgaaacggcataaagcactttagcttcatcgtacaattttggtccgtaaatcttggtttcgccaaaatatccacgagggtcgataaacttgacttcgccgttatcagtaatcatagtattactgaagttcgggtcaccgtgaataacagagtactgtccctgagaacggttatgataacgaataaggtgttctaaagcttgtttcagcattggcttcagacgtccaatcttagtgtagttcacatgtgtgattttaccaaatgaatcaatcaatggttgaatgctttcacaacgatcaataactttcgtatagaattctttagtgaaatcacgacgaacagtttcaggacttacaaaataagtgtctgtgctgaatttcagtgcatctaaaattgcatcaacaatttgtggacgagcaagacttgatttggatttaatatattcaaatgccggcttacctttaatgcgttccatttcaaagttattttcattaacagaaactaactgaggaactgaatctgatttcactttaagataccatgaaatctcatctttctgaagagctcgaccatgttcggttaatgcgaatttagttacagtttcttcaccaatttcgaactgcattaaaactacgattaagttcacgaacttcatgagctttttcaagtttaggcatatcacctaaatcaattagattcataagctctgatttattgaatgcactgccgtaaaggaattctacgaaatcacgtcctttgcagtattcgtgaatttcctcatcagtagaacccatgtagaattcccagtctttgaactgataaattcctacaacgttaccgcctgttgaacctacgttagtgatattttcaccatcgaaattatatcgacattcatcacccttaacatagattgcgttaacattccaagaccatgaaccaaaatcaggaataatatcacaccagttaacaattacgttatggccatctaaatctttgtataatttagcaagagcataagcagaaccatacgcttcatcaactgtacgaatagtcacattgaacccttcttgctcacaataagctcgaacagtttcagcaaattttgaatgaactactacaataatttcatctgcgccaaggtcagaataaattgtatacaaattgctcagaatagtgtcttgtttatagttaacaagcaccttaggaatatgatgcgttattggatacaaacgagttgctaatccagcaccaagaataacagcttttttcatgttgaagatcctcattggtaagtaggtgtattgtacactattctagttaaagcattcatactttgcttgtagtccaatcataatccatccaattacaagtgttggaatcattactggagccgttaagctccagtagatagtcatgacaagcatcaatagtaaaagtcctattgttattgctttcattgttcgcctcgtaacatagcacctagtgcaccgcctggatggaacttaaggaagtcattagaggtaaatccacgttcagacgaaaggttgatagcaaacgtatcgataagcgctaacaacaatgtagtggacatagtcggagccagagaattctcatcaacctctaccgcgatgcctgtacagaaagagtaatcaaaaagggcttcattttcttgtggaatgtctgggttacaatgcaacagaatctgtttgacgttcggtcgaatcattttaagatgcttagccacgcctatcatttcttcagttttaccagaacgactaatatgaatcaacacgtcattaggcgcaataaatcctgcatcaccgtgagaataatgcccagtgttcaagtacatactcgggataccgagtgaagcaaatgtctcagaagctttagttgcaatattagcattcttaccaacacctgtaataattactcggctttcataattactaagtcccgggcgtcgaagagtttctagaatagcattataacgagcagggttttgactaattactttggccatagcggccaaagaagaagcttgttttatgattgcgtcaatagcgatagtaataggagtagttttcatatttctctcatttaattagtttaccgtccatgacattatatcaaaaatcgaacatatcgaacagagatgctttcttctcgtaatcgagtttcgctgctgatgtgaatccttcaagtggtttaataaatgtcttctcaaggagaacagtgtagtccatccaatgaagtacgtcgtctttaattaaatctgtgatttcagtaccagaaggccatgcgatacatttatcaccgaatgggtttccttcacgtaaaggcagaacatatactttttcaccttctacaacttgtggtgcatcaatattacctttgatagctcggttatatgtcagaattccacgaatatggaacgggcatttgggaccagggaatccacctacgtcatatttagcaatgttattcgcagaagataccgacgcgatgctaatataattcaattgacggaattctttttcaaactctttaaaatattcttgtaatgattcttcaccttcttgaagcatacgacgaatacattctttaagagctttctgtactgctttaggagtcgaagatttctgagtctctagacccatgattttgagtttaggctcagcgtaacgagtaccttccatatcccacacgtttaatgcataacgtttcttaccagtccaaaatccgccaatacctttagaaccaagcggaggcccagcgatagcttctcggtccatgaacattaagtgttgtttattgttcatgtattcacacatttcacggaaacctctatcaatagctggttccatacgttcacgtgcaaacttatctaagaagtctacccaatggttggtatcacggaatttagattcaccaaccttatcgataattttatcagcagatacgtaaatagagtctgtatcaccataaagaacgaaagcttcaccttctgtaccacaaacttcattcagatattcattaactttacgttcaatccactgtaaagccatttgcccgaatgttgtgattgcagtagcattacgcaaatcataataacggaaccaaacgttgccaagtgcaccataaagtgagttgataagcaatttacggttaatttgtgcagtcatacctgcaacttcagtacgttgagctctaaacaacatttcattaagagatttagcagacaactttttaatcttttctttaatctcatcgctgaagtcgaaacgataatcaacatctaatggttcgtcaacagaaagattaggattatgcaatgcctctttaattatttcaccattacgttgagctgcaagcatgtaacctttatgttctttacgttgattaaagaccttagtgatttcagttggaactacaccatcacggtctttataatacatcatgccgttaggagaacaactgtacacatcagaaggacgttcagcaacagcgttaatataatcatgcaatggagctactttaaacgttcctgctattgtttctgggctaatattcacttggcgaataatacttggatatagagatgtaaggtcgaaactcattacatatttgtatcgatttggaataggttccttaacaaaagcgccgggataaggttgaaccgggtgagaacgaccttgtggaatcaccttgttctgctctttaaggctattaaaaataatagcatcccatgttttaattgggctaaacacagattgaatctgtatcttagcataataacccatgtccaaactcaagttgatgaactgacgcttagcatcaatttgcaatacacgatacacgtcgataatgttataagaaatatatcgttggtgattgctttcacgaagcttagaaatagggccgtcatatttcagtttaccaacgttcaattcaaattctgaaatgtaatccagagaatacgacggttgattggtaaaagagaattttttgtaaaggtcaatgtaatcaagaacagagataccgaacaatgtaatgatttcacgagaaccatacatgttttcgataactttaacacgagttttacgatgtggtgataaacgtttcgcagttgattcgccaaaaatattcttgattcggttatacacgtacggaatatcaaatgactcaacgttccatccagtcaaaatgacaggagttttctgttgccagaagttgagatattccatcaacaattctttttcgttatcgaacggcatataaatgattttatcaataatttcagatggaacttcatcaccaccttgttcttgaagcttagcagcgatttcaatagaccattcttctacattaccatatggagaattcaatagatcaaatacgtagaacctgtcgtcaattgagtcataatgggtgatagcatcaatcggatgttttgcttgtgacggctcagggaacccatccggagatgttacttcgatgtcgaagttagccacacgaatttttgtatggtcgtatttgatttcatagttataagtgtcagacaaatacgccaatttgaaatcgtccatgccaagtgcttcaagtccgatatcttccatgcgtttaatccattgggaggcatcacgcatattagcgaacaacttacgagtacacggtttaccgtagatatcgaaatatttcgtagcctgactttctggacaatgagcaaacagtgatggtttatattctacttcacgagtacgttcacggccattagaatcgatgtaacgttcaaaaattgaatcaccaatctgttcaaccgttaagtaaaattctttcatttaatttcctttagacgagttattgtcttttgtttgttgatgaacttattatactccaaatgggaccgaagtcccattgctttaattaccaattgtatattttgctttcaaagtccagtcatctttctgtttaaaagagataacacggaagttattagtcaggccaaacagatcttcacgagcagagtcttcaataacaatcaatccccagtcttcaagcaactgagcaatcgaatcacgtcgctgatagtcttcaccatcaatatcaacctgacgtccgtccatacgcagcatttctttaaagtggacgatgtaatatttaccttgcttttggaggatatgacaggactgataaagaactttatccttgttattagcgatgcccatacgggtcagagtctctttgactttcagaaaatcttcagggttcttcaatttaatttcaatcatttttaccattccaatgctaattttttaaattgtttttgttctttcacattttttgtaacttctttgagaaactcatcagtgaccatggccttcagttctttaaggactattggcaacttgttatttttttcaaggagccgtttatactcggtggcatcattcatgttgattgtgtaatgtttcatcaacaatttgataactagtaactctgaagtgtcttcgactagtttagcccatttagagaatcgacgaccacgcggaattgccgccatcatatagttgaagtgcgcttcatcacttaattcagaaccgactaagttcatcatgtaaacggctggcatacattctgggaactgggataatgagttctcaaccataaattttgagtagtcgacctgagcaattgacatagatttcttttcattaatagcattaatgattttaaagaattcattctcaggtttttctttaaacatatcagcacatttttgaatcgcatcagcgtcattagacttccatgcaatttgatgctcgttaagttggacgtcatcatcaaataagttcatattatttccaagtcagttcgcaggtcagttgaagaagcatatacataacatgtaattcaatattacttgctagtccatgaaacttattattttcgcctgcaatttcgtaaagcgaaataatacttttaccaggtgcaacttggtcataacattctgaaactaatttatcgatgaaccatgaataatctgcagcatattttggagctaatgcacgaagttgtttgatatctttgttcttcattgcttcgataacatcagagactgtgccacggtcattagttacgatagacagaatacctgcatcaagaacacctttagacgagtactggtctaattggccaattgtacgacgaaagtccgggaagttctttttaaccagagctgcaacaactttcatatcagcgatttcgatattttcattcttacagatttcaaccatacgatgaatcattttcttcatcatcgagattttatcttcttcggttggacgtccgaattcgataactcgacaacgactacgtaacggttcaataattccatcgatgttgttagcagtaataataatagaacagttactagagaattcttccataaacgtacgaaggtgacgttgtgattcggcgaggccactacggtcaaattcatcaataacaataactttcggcttgccttccattgagactgaacgagcaaatgcagttaacggaccgcgtacaaaatcaattttacaatcagaaccgttgacgaacatcatttcagcgttgatatcgttacataatgcttttgccacggttgttttaccggtaccaggagatggagagtgtaaaataatatgaggaagttttcctttagatactaaagacttgaatgtttcatggtcatacgcaggcagaatacattcgtcaatggaagaaggacgatatttctgttctagaatgtgttctttggaattgatagtaatcatgtaattttcctcattatcattaaactggaggatttctcctccataatcgtactacattaaacgtaaagctttgacttagaagtcgtgggtagaatcggcttccatcgcaataacataacttacttgagagctttcaaacttagctgcaactttatcaccagctccccacaacattactttatagttacctggctgaattttcatattagccatattgattacgaagttaaagttgttagaaccatcataatcggtaagagtcaaagaatacttaggacgagttagtccggaatcttcaactttattatagccattgataacaattttaccatctttatttgtaatagcaattgtatcaatctgaagaccacgtgaaactcgaagcaattgttgaaggtcttcggctttaatttcagtaatcacagaagccactgggaattgaattggcttattaggaaaaacaatggtgctcttgtcagcggcaggccaataaactgtggaacgtgtatctgcaattttaatattaccatcagtgtgcattgaaatttcagcatcgtcagacactagactcaaaatgcttaagaagctattcaaatcataaagtgctacgtcaaaatcaatttcatcagagatatttgcttccgcataagtggtgccattaactgcacgagtcataataaatttaccttgactcagcagaatgcctgagttaatagaggcaaagtttttcagaatagcgatagtatctttagacagtttcattttatttcctttcaagacaattcaaagtttataacaaatttattatgcagcaaccatctgctttttaatagcttcaggcagtgattcaatatattctggaattttagaagcaacaatttcgccagctgcaattagttgttcgtcggcatcaacacaatagaaatcttctagacgctcagaaccgtctttatcaagaacgatttttccgccagcttcaatagaatctttatagtgcttacgcatcagatgaatccacatatcagatacatcgttatcaataaaaccataaatcataaaacgagtttcttgtggcaaagattgaagttttttagcacttgcgtcatcacaatgcaggacccatgctttacgaacacgattatggttatgtgggttagcgtcagtacggatagaagtaactttcagatcagcagcagtgaaacctttagcagtagtaaacatattatttctctcttattcgtagaagtcggtaactgtccatgcggaattgcgattagacattattttattatactcatctttaaaagcagatttgagcatttgttcagtaacaatatgttcttcacctgaaaacgtattggtcagaacatattttttaatttcagggacaacaagaagatgttgaccggttgaatactccatgttgttctccatttaatttgatgtggtcattataaccacatcgtgttaaagcgtttatgaaacagtcattacagtaaatcgtccaactttgctcatttgaagatgttgtccataagcttgtgggtcatggtctctgtgactaattataaacacgtttgcatcggttagagagttaagaattgttgaaatagctttaataccttcagaatcagtcgctgaatccatgacttcgtccataattaatgtattgattctaacaccagagaccttttcggcaatatctcgccatgtaaacaacaatgcgatatcgatacgtgccttttcaccttgactaaatgaagcataactaaactcttcacggccacgtgattttatagattcattgaattcttcatcaatagaaaacacgtaatcagcttccatgattttaaggtaatggttaatctgcttgttgaacagaggcacatattttttaatgatagcacctttaataccagaatcttttaacatatctgtgataataccacgatggtatttttcaagaacgatatccgattttgttttaatgattttatcaagttctttttgaagcaaagctatctcatcggcatggtcgataaattccgccgaggcttgttctattgcagctttaactttcttagctttatcaatagtggcaatcattgcttgtttcttggtacgaatatcagatgcaaggtcctgtttagtcttaacattagctctatattcgtccactaggacactcagattatctctgtgacaggtaagttgctcgaatgagtgattacattcatgaagcttatcggtaatcttagagacaataggatcaccctggtgcaactgtgatgcacaagtaggacatgtaccaccatcatgatacatcttaataactttgttatatgagtcaattttagatttaatcaagaatgcttcttgtccgatcttgttgaatgcctcagtagggtcttcatcaagaacgatattaagtagtcgctcattagcttcttcgatttctgcttttaatgaacgagcttctttggctaggtcgtcatacatattctgtagacgcgctacattatcaccagataatttcttttgacgttcgatattctcattataaatcttaatttgttggataacaccatctttcttggcatcgagaacttgtccctgggaattaagttctcgaacttgagacttattgattttatccatttcagcgagtgtgccaacttctaaaaggtcttcgacaagttttctacgagcaggggtgctaagagccatgaaaggggtataccctgccgtcccaagcacaacgatttgtttaaaagacgcgtatgacattccgatgctacgttcaaattcttcttggaagtcacgactgctggcagattcatcaagacgaacaccgtcaacggagatttcgaaaatattgggcttttggccacgtttaatgaagtattttttatcatcgaattccatccaaagctcaactaagagctctttcttgttcgtgctattaatgatttgtcctttcttaacatcacgaaatggtttaccgaaaagtccgaaagtaatggcttctaacatcgtagatttaccaccgccatttttaccagtgattaatgtcttttggactttatctaattggatatcaataggattcccacctaccgacatgatgttttgataacgaacacgatttaatttaaatgatttcatatgtattctcttcgaatgaagtcctctacatattttaacatgtcatctctatcagcaaaatactcgtctagttctgcatacataacaacacccggtgcgtactcacaggtaacatacattgttccaaagaaacgaggagttgtctcctcgtaattctcagtccattcaacgataccaatataaccgtcaccaatactaaattcatgacgatggatttcataatcagtcttcgtcattatacgcatccttgatacatgcttcagccattttaagaatagagccaggagtatcgttgtccattatattaaagctaaattcaatagcccagtcggtgcagacatgaactgctttaacttcatcgccttcaacgcgtaatggctcaatccaatacttgatagtgttctcgaatccatcatcatctttaacgtccatttcaacttcaagcctgagtccagcattgttaaattcatctaaagtcattgtgttgcctcaatataaagttcgttggaatatttgaccagcgcttctctgtcttcgtctgagatatctggaatcgcgtcaatatattctttaatgatatcttgaagtgatttaatctcgatttcctggtcgtcatcagattcaacactgttatcaactttagaaaccatacgaagagagtgaactactttttcaagttcagattcaaacttagtcaactctgaatcaatttctgatactataacacgtacggctagattggtataatcagaataattgattttgcctttaaacggataagtgattcgtcgatgccatgttgtttcattaggaataaattccatacgttcaacatcagtgtcaaatacccagaatccgcgcgggtcgttctcatcacctgcagtaagagtccatggtgtcccaatatatttgacgttagcagcttcagagattgtgtggaagtggccggaccagacttgtttataagtctttaagaaatcaggttcaagcccatgagacttcatccctttatagaaataaaagccattcagttcccaatgaccaacacaatacgcggcagaagaagtcttgatgtgctctaagatttcacctgtattttcttcacacatccatggaacgatatcaatcagacatccgtcaaaatctacagtagttggatgctcgtaaatagtaaagttttcaaattgagttaacaattcagaaacagtgttaggtgttattgtattcttaaacgccatgtcatggtttcctatcgtgacatgaacgtgaatacctgctttagaaatcatatcaacgatttcacgattgaattccattgtacgatgtgttattgctttacggacatcaaaccaatcgccgtactgaatccaagttttaatcccgtgtttcttagagtattcaattgcttgacgaataccatcacgttgaatatcttgaacccatgggtcgtcttgtttgactccgatatggaagtcgcctaagtgcaaaattttcatattatttcctcattagttaattcattttatcatccgtttataaagcaaaaaaggaactccgaagagttcctatccacatagtacaccgtacagaggctcatttgaacttttaaatcgaatgggcttgtatgtaatagttccttcggctttagctttatcataagactctttaaaacgtctcgttctttctgctttgcctttacggattttatcgaaattttcagaggtcaggtcgttcgtcatgcataattatctctcagaaaatacctaaaccgatttctctcatcgtttccaccatttcttaacttgaaatgaatcaacccacacgagttgttttgggtctgcctttacaataggcggacaaatttctgtaatagaaccgtcgtgatattccttttcagaaattttaacacaaagaggacctcccaatttaagggtgaaccctgcgttcagcttcagacgtttaaactttgtttgaactagcgccattaatgatgtcctcaatagcttgacgagtagtaacccactggattttaattaacttgtcattgtatggttgtcgtagaatatcccgagatttcttaatagcatattcgtaagcttcgaagttgttttgaattgctgcttcttgagcatgagcataaagacggtttagttcaaaacgattctttttaagaatcttttcggattttttacgtgcttcagcttcatttttcttttggatttcttgtagcattttagctactgcatcttctgcttctttattttcaataatctcggtagtcatattatctcattaaattaaaataaaaacgtccatcctcttcaatacagaactcgtactcaactggagtcccatttattgaaaatgacacgtcatgcgggttcaaagggtcgatgtcaaaattaattttaaattcacgacccaacagttttaccaaataagggattgcttcgtcaaaaggttcttctaagtagttagagatgtcaattgtcatcctcatataaaaaatccaaactaggcgaatcgctaacaacttccttcttttcagccccaggagctttataagcggattcttcataatgcgtcattttatcgtagatgtcttgaataaacgtttcatctaccaacgctaccatatcatcgtcatgactgtcgtagacattatgaacgaagtaactatatttctttgcaacttccttacgttcttttttgatacgttggacaaaagcattaaaacaagctcgagttatgtatgcatgtgggttattgtacttagtttcgtcgaaattatgaagtcccttaatagaggcttcaatcccatctgcaatcatctcctgcttccaagactgggtatatcctgaaaagttgaaacgtttggacaggccttcggcgataagcataattgctaaaccgatggtatcattctgacgaataattttgtttgggtctttattatttaagagctcctttttccactcgattatcccggcgagaagctctttattattcacatagttatttttaggtttttgttcagtcataagtacctcttggctcaattcataggtctattatatcataatatttagagacctatcttaaagcacgagatactatcggagcaaacaataagcccgaaacactttttccattgaacgtttgaactcattgatatcgatataaagctcagtaagaccggcattataaagaaaatctaaaaagttctcatgtgtttcgttatagtcgccttcgtttaattgagatacatgagtttcccaaaaaccaacacctttaacgaatggaaaatacgtgactttcatgtattcgtcaacataaaattcgcccagcttttcttcagttatactgattcgagttaatttcattctatttcctttgctgcttcaagagcagcatccagcgaatcaaattggtcgacgaaatcaatattcaacgcatcgtcaaccgtagcatataaccaccattgtttgaattcatattctaggataaatccaggcccttcaatctgaggaagacctaggctatttgtaccaacttcgtaaccagctagacgcaggtcattaatcaaagtttctgttaatacgctcattttaccgccttaacaattttcaagtcagcgaattttttcttacgttgatttttcatactacggatagtcttttcagagatttcatgtttctgataagctttagattcaacaccaaatgcagcaccgtcaaattcagaaagaatatattgtactcgaatttcacgaatagaattacgtccaattttctggtccgtgtttttgcatgatttccataaagacggaaattcccacgcgtcaagaacttgaggagtaacaatattgccagattccagaagagcaacaactttatcgaaagcgaaagaattaactacgcttttgattttagtagacatattattttcctcggttattttattatccaacgagagaattatactcatctctcgagagtttgtatactatttttgaagcatggaaagtaagtaatttgtatcacgtggagtaatatcaacacccatatcaaagatgcctttatagattgggtatttgttttcggttgtatggaagctgaaactatttccatcacaactaacagtaatagcatctgttaaaatgtcatactcaatcctaacaattgaatccccaattttaacgtcgaggtgttttttgaatttgataaaatctaattcttgggccatgatattttcctcattttaagacgataggaagataataacatgtcttccctatcgttgtacattattaaccgaacttttttggcgcctttccagccttcgtacataactgcacaagtcagtagtacagcgtgctggcattctttgtatttgtaaatccagaaccagcgtaagaagtcttcatcctcaacgccggtggatttcatattggcaaagaattcggcacgttcttcacgaagcttttgcgataacatagattcaggattcattttgtgttccacaccccattttcatcgatgaacttaatccagtcatttacagaccatttagttgtatcaccctttggattaacatttaaagtatataatccctgcttaaaaagcattcgtttgatattcataatttcctcaactgtaacgataacattcgttagctttacgtttggcttcagtatgagaagtattataatcataatcttctttactgtaaacatcttttttcaacttacgaacttctttgcggagttgtcgattcatttcattcttgacttcagaatcaacgcctttcatacgtttccatttatctgagcggaaaatgttttcaaccatgtctttgtggctaacaccgtcaggagctttacgtttaccaatgtaataaaaatctttagaagacaaatctttacgacgatacgttttacccataagtacctcagagattgatttcaatgatacgtttgatatactgcacatcacttactgaaaggtctttaagaccaattgattctaaacgttgtgcaaatgttaacatatgggtgaagtccaattgcgttttagtcatttgataagtgtgaatgccattagcaaattcaaccttcaaatcgttaatggtgacgaaaatcattcgttcatcattcatgttaagaactagaacaactttctttgagtctaaactaatcatagtttaatttccttcgcaattgaacagaagatgccacggtcacaaatcatttcaccgattccaggatacttgattgagcgataccaaacatctagagttgaaactttggttattataataacattgccgttaacggaataatactgatcaaccttaatttctttatcttcaattgtcattttgttttcctctgtggtagatgatgctaatcttaacatatctatcgaggatgtaaactgttttatgaaaatatttttgatttgagaggggcacaaggagatagtgaagtgaagattccaatggattatattagaaatgagataaagaagaccaggcggcacctggtcaatcttctatgatatcagagtcgtatcctaatgaaatcaaggactttttaaactctgcaatatctttgtttcttatcatttaaaaatatgacaggataacgaatattaagtgaagtgaatcctgcacgtttagcaagagatacgattaaaggacggtcatattcaatcttaccattattagtgaggactttataaaatgtataaggagcattgagctcctttaaaagttttgtaacagtataacatcctggacaacgtccaacttcttcagggatgccatatatttcaatcttgttctttaagttcgagttttgttccacgagaaataattccttggtaagcccaataaggaggattaacagaatcctcaccagagttttcttcaggaaaataaacctggataacaaatccagatgcatcaaaggtaaaataaaccgtaggcagttcacctaacaattcggcacgagcattaatttcttcgagatcccgttcacgtccagcccaaaaactaggatttagattacattcgtaaaaataatagtcattaccgaacatatcaaaccccttccaactctctaccacataccgctcaaaactaatcataattaagcctttttatcaagaacagaattcagtttattagtaattttgtccaaacgttcattgaattcgctggaggataaacccttttccggagaaattaaactaatcacgaaaaatacaccagtaaaaggaataagaaaaatagctccaactgccataaacagaaagaatgttacagttgtaagaaaatcagctaaacctttacgaaatttatacatatttacccttaattaattaaccaaacattgataagcactaaactatattgcgaataaaattctgggccaaaatgaaaaatcatatcatttatagtgtccataatgtaattcaatttaatcatgtttccacaccccatcggtatttgaccaaagtcgctgattatctgatcctcgccatagctttttggtcggaagatttttctcatacttcccatcaataataacatcaacatatttaagcatttctagttgtttaatatcttcaaacttgtatcctgtccacaaccaaatgcttttattgggataaagattttttactgtttgagcaatgcaatgaataacatctcgattgtcaggatagagagggtcacctccggttatagtcaatccttctatataatcgttattcaaacattcaattaattgttctagtgtttcaccagtgaatggaacaccatttctagcattccatgttgatttattataacacccttcacatttatgcaaacaacctgtaacgaaaagaacgaccctacaaccagggccattcacaaaatcgcaaggataaaatctatcataattcattggtgtttaaccctatgcatgatttctttatttttaccgagattaaatccgcgttcgttcggatttcccaaataaccgcatgttcttcttatggtgttcatctttttaggatcagtttctccacaaatagaacaaacaaatccggtttcagtaggagtcatttcatgggtacttccgcatgtaaaacatttatctactggcatattaacaccaaaataatctaaatgttgtgcagcataatcccacacggcctcaagaccttttaagttatttttcatatcaggaagttcaacataagaaatgtgaccacctgtcgcaatgaaatgatatggcgcttcacgagaaatcttttcaaacggagtaatattttcttctactgaaacatggaaactattagtgtaccagcctttatcagtaacatcctttacacttccatatttttctgtatcaagtttacagaagcgataacaaaggttttcagcaggtgtagaatacaagctaaaagcaaacccagttctttcagtccattgtttaagaagagcattcattttagttaaaatttcttgtccaatatcacgaccgacaagaatattcaattcgtgaataccaatgtatcctagggacactgaacttctaccatttttaaataactcaattatgtcatcatcaggtttaagacgaaccccgaatgcaccttcttggtaaagaataggagcaacagtagctttaactccttttaaggaactaattctacacatcaaagcttcaaaacacaggtccattcgctcatcgaacaattcagtaaatttctgttcattgaactgtgttccaatataagaatctaacgcaatacgaggaagattcagtgttacaacgccaagattattgcgtccatcaagaatttcattgccagttgaatctttccatatgctcaagaaactacggcaacccattggagaaacaggaactgaagaaccggtaatagctttattattcttaaccgaaataatgtcaggatacattcttttgcttgcgcactctaacgcaagttgtttaatatcatagttcggatcatctttataaagattaacaccttcttcaacaaacataacaagtttaggaaaaataggagttattccatcacgaccaagacctttaatgcggtttttaagaattgctttctgaatcattcgttcagtccagtcagttcccgtaccaaatgtaattgttacaaaaggcgtttgtccgtttgaactaaagagagtatttacttcatattcataagcttggaatgcatcgtatacgtctttttctgttttagactgggcataattcaacgcatcagcgatttgccatttttctgcatcctcaatatgttttgcataggtgcgtttaacataaggagaaagtactttatctacattagcaaaagtcgttccgccgtattgatgggaagcaacctgtgcagtaatttgtgccataattgcagtagcaacgccaatagatttaggcgtttcaatttgagcattgcctaatttaaatccattctcaagcatcccctttaaatcgactaaacagcaattggtaaacggaagagcaggagaataatcaatatcatgcatgtgaatgattccgctttcatgcgcatgcataataaaagacgggaccatatttttggcaatgtgcttagacacaataccagccataaggtcccgttgagttggaaaaacacgagaatctttattagcattctcgttcaaaagatctttattagttttataaattaatccttcaatttctttttcaattttcattttaaactctttctaagctgctttttgaatgaagctattaattgtgttttagtatcagattcattatattcaaatcctctttgaagcatctcagccatcatttcctctttacctagtcttgagaactctttagttttgtctggaacaaaattaggatggatattattatcagaataatcttgtttcaaataagcaagaagagcttcaagccattctaagtagtcaacgttttgtcctttcaaaccggaacggttgaacttatgcttcatttgaccttctgctgcgttgcacagattacagagtaatccacgaactctaccggcttttggcccgtttaattcatggtcgtggtcaagatggttaccttgaacatcagggtctaattcacggtggcaaataggacacttaccgttctgtgcatcataaaatttttgtttttcttctttatattttgcgcctgataataacatgataaacccttaccttaaatagataagggtatttataatttagtaaacgttataaaagtctcgatgaaaacgtttatattgacgaatcattttcttagtaggacgtgttactgaaataattgaagtagtcatagtcggattgtttggagcgccagtcataacaaatttccaggatttttggccattttttctttcaccataaaataattcagttttcataataaacctttaacttaaacgtctttctaaatattcaatgtattccgctgcggcttgcatcagattaccttcataaccgtcattattttcttgggcggctaatttagctaaagcataagaaatacgttcaccttcgaattcgccaagtccaccatcacaaactacttggtcaatttcttcgagttcatctattgaatgggattcccagaagcaccaaagagaagtatcacggtcatagatgcaaagtttctcacctgtgttcaacatcacttcgataatgccatggtcgccataaccatcttcggtagtagtaccaattaccttgatgattgttcctttctttaattcaggaaacttgacttgtagttcttcatcttctttaacaatcttgaaccatttaccgcgagtttcagaaatattcatatcaatattctctataaaagttacgatgagaacgtttagctttgcgaagctgacgtttagtaggacgaactgtaaatggttgtccagagaaaaaattcggatcggttttaataagcaaataccaatcatgtttgccatttttttaataaacggtacaataatttaacttgcataataatctcttcccatttccatatcaattaattcatttattgaaggttcatcataacatggttcttcgtcgttgtaaaccgtttcgacgtctggctcgacagtctcccatcgagcagaataccacggtttaaccccggagtttattgagctcttcataatcaatccaggattctagccctgacggcaggtcacattcaatgttccacagaagctcttcaatggcttgcaggcgattatattcttcaacggtaatggtaaccattggtgcaaccggttctgcctttttaaccatcatatcgttcatcaggacgtaaaggtcatcacgaacgacagtgtccgttccaaccccatgatttggcttcgtaagctaatgatgaagggagcacatttaaaacttcaaaaatagttggagcatcaggaccaagttcattggcacaaacttcgtatacatcttggaaatctttaagatttaatgaatatgtcatttaaaatattctcgcagttggtcaaatccaccaatgtgacttccgtcaggagcaaacacttgaggcatagtcaatccgacttgtgattcacgtccaagcttaaccagaagctcagcaattttctcatcatcaaaaacacctttttctggcataacattaatgaattcgaacggctgtttcttaacagtcagcaatcgtttcgcattatcacaataaatgcatttatgaatagtagagtcatacccgtacactttaaacattatttttcctttcatcgattaaatatgcaatgccaaatacaatacatgtaataaaacctgtgatacagatagaaaccaacaacactgtaccaaagaaccaaatcaagttatctttagtagtttgtttgatatccatctcacgaatttctatagctatcgtatcacctttattcagaagcgtataaaacgatggtgatacacgcctgtcaaaaactcgtccttgctcatctttatagactgcaataaattctaatttagaatattttcctgtagattggcctgagattaattccactacctccacaggaattactttagtttccatgtaagtattctggctgttccaaatgaatggaataatagcaaaaactaaagctgcgataaaacaacgaaggctatatctcattataatgttctctcaaatttgtggaagcatttacggcatttcaatttcaagttatcagtggtccagttaaccagttggacttggatagttccacattccggatatggatggtttgatgccgatttggcagcattttcacgtcgttcaaccattttcattatttcgttccatgctggaggaacgaactcttcttcaccatgaattttatctcgctgaacaaattcaatctttgaactatcgtcaataaacttaaccaagccatgattagtgctcatatcaatatcctctaaaagacgtagtttcattataacacctcaatggcatttcgtaaaccatccgctttcgcattcagagcttttaacgatttagtttgttctgcaatctgggcttcgacttctttcagacgagatttgagatattcgcgttcttctcttaagttatcaaccttttctgctttaggttctttaataggcttaaacacattagggttcttcagtttaattttaattcgagaactgaataacattgaaccgttatcttcggtttcactgtgcatttctaccacgtccatgattcttaacatcatgcgaagtttataagacagcgaacgaacggttttattgtgcttcttaatttcttcagctttcatggtgccgagattacgtgagtaataataaggaacctgaatatcaattgataatgatgcggtaccattaccggttggtttgaacactgcagtaacccaatctttaacatgaactttatttgtacgatcatcgccgccagtgaataatttacaagaatgtttaaaaagcatattcacttggttattgaattcacaagcaaatttatcagcaaatttagtttcaggaatggtagagaaccaatcagctaaatgagtctttttaacatcattaacaatagtgaattcaaccaaatcggttttagatgtcacagatttaataaagctcggcttcataaagtttttgatgttatcacgagctacagtagaagataataaacgagaacgtttgaaccattgaagcagtgtccctaatgaatgagaatacgcattctgagtatctttacagatatgattttcttggcccgtgtatgtaccaaaatcgcgaagaataccacttactacatctcggtgtggaacatcaaatcctagtgcaccaacagcgcgctgggcatgaacgttagcgataagaccggcaaagtattcaatgtaatgtgaacgtgtcataatgttttcctctcgttaagatagaaagattatactccaaccatccttggttgtaaactgtttttatgattttaatgcattcattgcgttaaaaagtttagaatactgcaactggagattcgttacaacactttgagcatcacggagcttagcttgtgccttgtccagttcaacagacagttggtccacgggggctttgatttggttgtaatggtaatcttcggccggaagaaggcattagaacatttagttttactgccgacagtttgcacacatttggcaacctttaacataccaggttgtgccggagctggagaatatgcacctaagacttcggcattaccaactggtgttgcagtaattgacgcttcgaacgttgcattttcctttttaagattttgatagtattcagagtctttgtgccaccatggcgcaggaacctttttaccaatagatacacgagcctggatagcaatatgacccttattcttgatggggtcgataatattaagctcacgagaataaattgctttaatctggtggatattatcacctaacacttccaacgcttggtggaatacacgagcaacgttatcattcttaggtttatacgtaagagtgaactcattctcactgataaccatgatttccaacttatcgtaagtatatttcaaatgtttcatgttaattgcttgaggacgaatacgagaagcaatggccaacagattgttaaggttatttctgaactgtttagcaaaatattgtccgtagccgccgatacaaaaattacgaagtttctgtttggctaataaacggctgaactcaccatttttaatgaactctttaacgggtgtgttagtaacgcattcaaattgagtaaacttacgagaattaatcccataatatgaacagatttcctcaatctcttcaggagtctttacaggcatacggataggattaggtcctggagtatatgcgttcgaggtaaattctttgataagttctctacgtgtaatagaagccattttatattcctcatgttgaaaaatttattatactccaaccatccttggttgtacatcattccttaagaagttttactacttgaataagattagctcgttctgttttatttttaccgtttaagcctgctaatcgtgagatttcatcgtcagtctgttgaatagttacattaagttcgttaatcaaagcttcaaagtatttgatttgctcagcatgttttgattcaaatttctgaaccggaataacgtcttggtttagttcgtcaataaggtctttaagagcatcttcttggttgatatcatattcaacttcttttatttcttcaacgagctcgtctttatatctaacgtcttttagtcctggtgctggtcctgaaatctcttctttaagagtacaaacatacccaatacggtatccaatgccgtctcgcttgatatcaacttcgtcgataaatccacaatgtttaagaccagagccgattaggttaaaatatccttgacgtcgtccttcaaacgttacacgaactactaagacggttttgccaccgaccttttgaagctcacatttataaaagtcagttgaacctgaataacgtggatgagttttaaagttcatctgacgatctaggcccatttgtaaacgtgctgatacggccagaaaacgtgtttggttctcgttaagatgagcaacaatctgtttcaaaggcattttaccctgttcacgtccgaacaaatcagtacgtcctagattacgcaggatgttgttagagttaatcatcgacagaacgttaagtttattcagcgcgctgaagattccatcagccattgattttccataacctttacacgctttaataagtgctcgcggcagattagtatagatttcagacggcatatgaaaatcaaatttactagtcagtaattgatgaacttggatagcaatttgctcataattaagtgctctgcgatcgttatggtctttaaaccacactttaatctgtgaagcacataaaccgttaatttcatgttttaccgcatcagatgtaatgctcataactatttcctcagattgaattggaactcaaaaccattataacccgtccttgggtaaagcgtttatgcgtgaaccgtctttaaacgttcttcaaatttccgaagagtactaatacgttctgctttctgttttgtatagtttgcaatacgttctgaagtgagagcgtatcgttcgtttactgtttctttcatgaagtcagggatttcacgagaatctccaatttcatcaaacttatcgagtactgcctggtcttcagcaattaaattttcgtacatctcgatatctttcttaataaactcgatatcttcctgggttactttggataaacgagatgctttatcctttttgtgctgttcgttagtttcacgagaccagaataatgtacgttttttgttagtgtttttgtagacttccacaattccaactgaatcgatgataacaatccaattccagcgagatttgaaaatctgacctccgtccacggtaatctcgttaccataagcaacgtcattaaagaacttgctttgtgcttcagatttaaatttaccgtcgttataatttaccaggttgaaaatatctttagcgttcatgttttacctccagtagttgataggtctataataacataaccatagaccttgtaaacaactaaaagaaacttttttcggtattttttccactgaaccaaactgacttcgggattttttgtaatttttcagatttaagtttctcttcctgttctttcttatatacacccttgtcgtactggagcatctctagggcattcttttgcaaacgatctaaggtaattaaggctttagtttttcctttcaaggaagagtcttggcgaacctcctcgctatattgttctgttgcactaatcatacgatgggcatataattcacgacgggcttggatattcataatttcctcatttcagtaaagtaacttccgagatttcctcccaaccatctttatccagttgaaataaaatctgctacataaagagccgtacgtaatgatacattgcgaagacgagatacgttagccttcatccaggacaatgctttgtacgtttctgcatccgtcaggccacgtttctgcatcatgtcagtagataatattacatcttcaactctgaccataatctcttcattagagtgtactccaaggtccaaatacactgaacgagatactaaagcttgaaggtgtggagcaagtttcgaaccgcgttctaactctttatcgatatcaacgtttgtaatgaaaacgatagtaccttcaaactcaaattctttatcgatacccttatcatcaagataagatgatgcagtgctccagcaaactttgcgtttatcaccagtatctaatgcggctttaagaaggttcaagatatccatatctgagaatacgtcaacgtcgtcgattaagagaacactgtctgcatcacggttgagccaaagttgttcgtaaaggccaataccagagattttgccattaatgcttttgtatttgatgaaaccattatcattagcattattaagcgctttatccagagaatacgtcttaccaatacctgctgcacctgaaataatgagtgaacgaattttgccatcaataatgccattcgtcatcatgttcattactttaaagcgtttgttgatacgagttttcatatcttcagcgctttcaacaactgcaactggtgatgtctcaactccttccattacgatgtctgatttgaagacccatactccacgttcagaaccatcaatcataccgaaaattttaccgtcacctaagtgggaacattcaggattaagctttgccgggaaccatgtctttgtggcaacataagaaccagagatttcgttattacgatagataccttttttgatttgaacgttgaacattttattctccaaatttactcatttcgtttcgataggtctataataacatgtttaaagcaaaagtaaacaattatttgcgacgagattttttggtaagaggttgaaagaacactgctttaccagcaggagtcaaagtgactcgtaatgcattaccgattcccaaggatgctttaaccagacctttagatttcagttcaccgaatgcttgacgttggtctgcatcacgagtgttaaccataagacctttatcaccagcttcacgaatcatttctaacattttggttttcattttgttctcctcttgttttgataggtctataataacatatcctaaaagcatgtacactactttttaaaaatattttgaccccctaaagggcccgaaggcccttatcatttatagtacgaattgtggttttctaagtagacttgttcaaggaagtcgtcccagaaactcatatctactttttgctgcataccgttcttagcagcttgttctgccgcatgttcaacttggtcaacgatatcttctaagaattcctgtacggttttaaacgtatgtttaccaagcttaacatcgagaataaatggagcatcctgaagcgggtaaaccaggtcgccggttttgtaaatttctaagagctgaagtccaccacggcatgcatgactcaatgctttccagtcaataccttcgttagcttctgccttacgagcacgttcaccatagttctcttccagtttaaccaggatggcattgaactctttattggttaacgtatcttggaatttacggtctaacagattatagaatgtttgcttacctgttttctcgttttcagtttcaacccacgaagcaaattcacctacaggcagaacattcttcatatgtgataaacgaattactgcaccattatcaaagtattgtccccattcattagaacgtttaagggcttgacgaagaacagccagtcgagaacccttgacaccgtatttagaagcttgcttacggacataccctaaataagatttcatgttagtggtatagaaacgagacctgttatcttgaatatacttccatacatcaggcaaatcagatttaactactagactttgtggagtgtgaagcatatctaatgcgacggtttcaccatctgcagctagtttaaagaaatatttgagactatacagctcatggtccacgtcgtcttttgtgttcttagaagcagtgttattcgtgttcttgctcatgtgttctttaacgttaccggtcaagatatcacgagcatgagggacataaatttctttaaaatcaacgtcagattcaggagtagacgttccataaaggtggctaccaaagtagcctttcataattgttttcatcatttagccttatattcaagagtaggacagactttttctttacgagctttaaggtattcacctattaatgatttcttacgttcaataggctcaagtccatttttaattcgttcttggttttgtgcaatgagctcaatttctttataatattttctgtcgttatatttgtctaacaaccaagacggaccaattaccaacccggtagaaataaaagccatgactgctacaattaaaacgcctacaccaattgaggctggaactaatgtccatagactgctaaaaacaaagaatttagttaaaatttcatggccaatgattgtgactgctgctaaaatcgcaaatccaataatcgaaacagccaataccgggagaaatgttttccaaaaataagaacacaacgttttcgggcgattccatgtactattgaatgcggcataaattttatagtgccaagagttttcattgataatcataataattccttatttcaaagtcgggataatagaatcaagataagctttaagagcaactgcttcatctttgtctaatgtaatgatatgttgacgaaggtcatcaatttggcgaataactacgacatcaccgtcttcataagaaggattaacgcctaagactgttgtatagtcagggcggtcctgatttgtaataaaagcattacggcatttagcccattgaagtttggcttttttgactgtttcagattccatgaattctttcaccttagtgacgaatgttttccaattattaatagaaaaacattcgtcttcagtttcgatattaaccccactataaagtccgtgataaaaacgaacttgaaggtcttcgtcaatgttaattacagatgcatggcctggtggattgagtttcaaaatcttgtccagttccataggaagaatagtaacagcatcatcttcttgtgtcagaacgtaagcataaccacgtttttcgatacataaatcgccaaacaactcggttgtttcaattacagttttcatattattcaccaattaaagtttcaacaaaattcaccaaatcattcagacaagcatcaacctgattttcataaaagtcttcgttatcatttactgcatgataagctacatcattcaaatctgattcggcctcacgtaagtgagggataagttccatcaatttattagcttgttcacgggtcattttaccatactcgcttcaataagattaattacaccatttaccatgttatacgtaaacatcggataattgtattgtactataacataagcgataagcaaaagtttcattttgttctccatttgttttgataggactactataacatagtcctaccaagatgtaaactaccgattgtgttttaaatgttgataaagttcttcaacttgtttagggtccaaaacaattaagtcattttcttggcgaagataattccatcccttatccccagggccatttttacaaaacatcaccgtcgtcatatcatcatcagcgctttcaggtaaaagtttaagtacaccgtcttcagattttccagtataatcgtaaagcataatgtcctcacataatctcgttaacatacatttgcaattcggtgtgggcgtcggccatctttttcatagctctgttaatgtcgatgtctccatcttcgcaaccatgagcattttcccaatcggatacagaattagcatactcttcaatcaaaaacatcaacttagaaatcttttctttacgtgtcataacgttctcctctagtaagtaaggactactataacacaacctgaggagaagtaaactgatagatgccaaaaagccccaacctttcggaaggggctagtaaattagatagatgtaggctctaattttattttcatgaactcagcaaattttctggcagtttttatgccttgttcatgacattcaaatgcatcatcacaggggctatttttgtaatgctttgccatatacttataaaatttttcagaattctcaacattttgaatttcgaacaaagtatatacgtttttaatccctgattccataaagttatcaaagtacgggtcaacatatgcagtgccaacaataggagtcgttgctgcaaaaaaccccagcatcgccacaatggctatcgctcttaaggccatataggcctcctgttaattttggccagtatttatttttcgcctttggacggccttaacatctgcgaggtatttttccagcttacgcttacgagtataatctgctttagaaccagtttgacggatatcctcatttaaatgagaaatagaatgtcctaattctcttcggatttcatccaattgggttacagtaagattacgaagttgtctttcgtttaattgctgcatatatacctcttggttagatattagtatttataacaaccctgtcaaatcgttccaatgcttccggcataatgacacgtatctatcggtatcaccaatttcaatttgactgccatctgtaattggaagtccgtcttccgtgactctagctaccattgtggcctttttaccgcaatgacagacacctttaagttcaacaagcttatcggcaatagccattaatgcttgagaaccttcaaatagattacctttaaaatctgttcgtagtccgtatgccattaccggcacattgtatacgtcaacaatacgactaagttgatacaccttttcagtagttaagaactgagcttcgtcaacaaatacacagtgaatatccttttgtgctgcagcccatttatagaattcaaagatatccatgtcttttgtaattatattggcgtcctgacgaataccaatacgagagactatttcaccttttgaatcgcgagtatcaatagccggtttaagaactaatacacccatgccacgttctttatagttatgtgcggcagtaagtaatgaagcagacttaccagcgttcatagcggcatatgtaaaaattaaactagccataagagtcccttatagtgaattcacgtagtcaatgagttcttgttctttcctgtcaaatgattccatcaatgcgtgatattcttcatctgttaaaggagcatattcatcgtacgcattggtggctgcttgttcatccaataggtcatggataagttcgaacagtttagctttctcttctttagttaatttcatttaggttcccaatcaacaatcacaatttctagtttagtggaatacgtatctaaaatctcttcgatgacatcccagtttccgccaccgatacctgcaccaattcttggcatataaattacaggctttgttatcttattctttccgaattcatttaattctattatacaattcattaaagcagagtactcaaaattaggtcccggctcaaactgcgtataaagattaaagcaataagctttatgggtcttaaaatatttttcataaaccgaataagtcccgagtttagactcgtctccaaattcggtttgaagtttatcggcttccagaatttttggataagcctttgctaattgtcctgccacaccaccgcccattgtatgaaaacaattacatccatgagcaatattattacctttagaaaacagggcgacaatatcgcccttgatatagtttttaatcacttgctgcaagtcctctagtataagagtcaactagacggtccaccatagaattgcatgctgccttatctttaggttccgccaccgagcattctaatatttgccattttttatagtatcttttaattaaggtagacgccttgaacctactagacgccccatctttttctccgtctttatacgcatataacaatttttgtgaaaaatctactttacactcttgacttttaccgcaataatcagacgccgttctgtttgtatactccgttacatcagtatatgtagtattagcaagagcgttaaatgaaaccaagccaactattaaagccaacattttggtcattcttttatttccagtagtttatttgatttaaggtaattagccttttctaggacttcagaagcatatttacttccagcacttgtcttccatcccgcattatatgaggatatagcttttcttatatccccgttatgtatatttaaccaataagaaaattcgatataagcccatctggctgaattagaccgcttagatagcattttcttaatttgggcgtcagtcatattataaccaagctggttaattcttgccctcattgtcggtagataattttggaacattccatacgcatggtgacctttcttatctttaagattaataccggcagatgattcctgccatagtattgcggccattatgtatccaagtcctttcttatgcatattttcatgcgttttaaattttccgtccttagaaaactgttccccaaactgataagcataattcaagttatcgagttggacattactaaaagtatgctcggagctatgtgctgataacgaaagagcaaatagaccagcgagtagtgcttttctcatgtttacctctagattttaatcactgctttagaagcttttcctggtagtcgtttactgttaataatagccattctgcattgaagagtcttcattttgaatgctggattttcgcgacaaactgtaagtcctaaccaaagatttccatcagttatttctaaacggcccgggcgatattcgacaccttcgacaaaatcttcatcaacatctggacgtgccggcattgataaaaattctgcaacttctttaacatgattttttactttatgaaataattcaaaaacgtaattctcatctatttctctctggatggcacgatctaagagatgttgagaatacttgatatgaaagcctggtagtccaagagactttgcagcatcttttatactggcatttattttgcggaactccgtttcaaagattcgacggagtttattacggcggataaaaacgtctgaattgatagtcattttgatttctcctctagttgacaggtctatagtaacacaactagaggagaagtaaactactttattgataaaatgagagttaaggcccaagattctttagatactatattggcgaagtgcctcatctcttcgatttggcgacgacgctggtcagcatagtcttcttcgccttcttccttacaatcttcaaggtcttcttcaagatactttaagtattcactacaaattttgttgaccttttcctggaagtccaacaacccagtaatagtagaagccattagtatttttcctcaggtcgaaatactgcacgacatgcccacatgctggcttcttttagatgttgcttagcatacttaagagcctgcactgcatccatatcttctttggtttgttgctctgtttcattttctttcaagatatatgcttcttcaatcagagcatcaaacatcaatccaagacggacttctgcatctttaatagcgttcactttaccgattttatcatcggtatgcggcttgtagcctttgatgtcttcaatcgacataaggaatttcctcatcggtggcaaggtcatattcgaccaattggataggctcgttaataccatatccacgtacagtgatatcggttgtcggatattttccagtaatatcacccattctaaatgcttcagtgaatgattgctcgcctgagcaactaaaccaggcggcaaaacattttaaaacatcttcagacccttctataatcaatttagccattatagactctcagtaaaggtacgagcgataacgtcgcgctgctgttccggagtcagagagttaaagcgaactgcataaccggatacacggatggtcagctgcggatatttttccggatgcttaactgcatcttccagagtttcgcgacgcagaatgttaacgttcaggtgttgaccaccttcaattttaactttaggttgatgttcaatttcaatttcacgggcattcaaaccgtagaaaatttccgggtctacaatagagtcttctttaaaagtcttagagacaataatccgggcttgagtaccgtcttcaaaataaatagtgcctttatgtgcaccttcaagaatttgatatgctttcatataacctcaattagaaaataaatttatccaagttttttctttaatcaaaaatgggtcggaattaaacgccattaaactttgagtgattaatcccttaaatggcccatcaataaattccattttgaaatgcggaatactagtcatcaaccgtgcattaggagcagtacaaagaacctgctgccctgcgaacggacctttagtcaaacggtatcgtttaggtttaaaatggtaaatctcgtaattttctacaagagcccttttattgcatactgggctgttataacaatattcaaaaacttcaatagtggtcatcattgcattccaatcacaaaaaattgaggacgagcaataccgccgatgcaatatttgcttttgcaacagtgttggactgttttaatatgtatgtcgtaaatcttatccatatcaggagctttaataggctcgtcaattatatacagaatacgagaaagcgttaatccacggaatttagaaccttcattgccaataaaactacgaacagaatcagtaaataaacggaatcgaatatcgtcgctagaataacgagaaaattctttttcaatgttgccagcagaaattttagcataagctgaagtattagaaagaacaataactgttccaccatcatacagccaattagcagcaaagttagtcacagcaattgatttacctgattgtcggccgccgtctaaacgaagtgtacagtactgcttgagtacgtcttcaaatggtgggacataaccgttcttacaaatttcttctactctagcatcagaatggtgtgtaaaagcattcatcagggatagataaggtccagttaaaaatgttctcatattatttctcttaaggttttggccattccgtggcacatgttaggtccttagactcgctatgtaaacccattaccgcattgcgctcgaccttattacaggttggaaaaggtacatcactcagaggactcgacgttcataaggagaggttgcgtttccctttattaggcaagaattatactctaggcttttgagcttgtttggtattggattcccatgcggctttggtaattttgttagcggcataaccaaaggcattagatagaacacctttagagttgaatacatccaatccaataagtacaccggctgtgttaaatttaggagcaaagtacgcattagttttagaaagagcttttttcaattcagggtcttgaaccaagccatcaaaaacgcctttactatttactttgtatgttactttgggatttttaccttcttcgatagcagctttctgttccgcagataatgtaactgcagcgataaactcctgatatgttttcattttgttcctattgttttaatttatgttattctttagggaagtttttagagtatgcatcataaagtttattaccaatacgacggaagactttcagctgcaaaacggttttcagggtttttaatcatgatttgcatcatgtaagttcctgcatccgaaagagcttcttcatagtacccattaatttctttaagagtcctacgtttaccgccaggaccgtcaacagtaattctccatttacctgtagaagtgcggctcggtggctcaacttgttcaatccaaatataaccaccttcaacgcgttggttggcggattctgcaataaattctttatacgttttcatttttgtttccttgtttgttttgatagagtaattataccatattaatacttaagcgtaaaccgtttaagcttgaccgccagaaataattccgaagttgttaaaatcgtatccaatatcgtcaacatctactttaggacttactacaacataagcaatttcactacgttttgcataggtgttgatttctttaccatcgccacctaagaaagaatacccattacgttttaatgagccaaaatcttccgcatcaccaatgaaagctttaactttaaatttagggtctttggcatctgcttcaatgataaattcttgatacattttcatttttccttagtaaattgatttaccatagtatttgtaccaagtcggacgttgagcaattttttcatctaagcgtgcttgacttatcgcaatggacgcttcggacgggacataattattacgaaattcggcagggatgtcggaaatatcctggacagtcgtgtccttgattttgaaaccacgtttcaagcattcagcgattagttcgatttgacgtaaacgtaaaaattcgagtttgtcgtaaaagaatgttacgtgacctgtgcctaagataaatgttggagagattttaaaatcctttacacgtttaccgttttgaacatgtttacggactgcaccaaatacgcgtggtaattcacgatactcagccataagatgttggtcggtcagttcagaaacaagtgttaaattgatacgagtcataatttcctccaagtagttgatgaatgtatagtatcaaagtccttggaggaagtaaacactatttttctgaagcgcctgaaatatatttttcaagacgttgtttcattagcgagccgttcttagcgatttcttccggtttatcgcacatacgcaacaaggcttcaagcttaacgatatcactggtgcgctcaaatttgcgagtatctatcttgctagcaagttcagaaatacgtgctaatagactttcagcttcaaccaaagctgcacctagcttcgtggcaaatgtgtcagtagcttcgttaagagatagattctgataaaaattcatgtatgttttcatatatacgctttccaagttcctgttttaaatgttgagattacgcgtttcgcgcgattaggtgtctgacgataccatttagattgggctagatttactgccgcttcgtcccaacgtttctgttgaagcatacgaagagaattagtaaaaccggcgacgcctgatacacccatttggaagaccatattgaccaatgcacaccgacgaactgcatctaaagaatcatataccggtttaagtttagcattacccaagattccgcgaacggctttatcaacgtcttcattaaatagcttttcagcctcatcaagggtaattgtaccgttgcatttacggccgatcattctgtcaagttcagctttagctacggctaaagacgggttctttgttactaaatggcctatgccaatcgtccaaaagccttcagtgtctttgtataaagtcagtctaagaccttcgtcattacgaagcatttcaaatatattcataatacctcccacgtttataggaggtatttattacttataggagggtagtgagcaccttatataatgatttgcccattacatattcccattgagaaggtttaattaaagcgaatgcatcaaattcaggaatctgtcgtccgtctgggaatgtatgataggaattacaaacactgtttctgaattgctcgtgctctacagggatggtatataggaacagatgaatattcttattgtctgagtaatgatgttcacctaggtctttcaggaaggcagggtcatattgtgtaaacccagtttcttcttcgcattcacgaatagcggcttcaataggagattcgccaggttcgacacggcctttaggaatatcccaccgatgagctaatgcacctttaggacgagaaccagttacacgccccatgaataattctttatcttcggtaaggaaaataataccggctgatagttctttcactttatttttcttactcatcatctcggtcccatgatttggccattaattcggacataaattcttcaatgcgcgtttctttagatggactttcactattagagaccgcaagtttgtaatctgcaataggacggaacaaatcaaggtccatatcaaggtcgtctttgatttgttcttcaggtacatctgtatcatacgtatacagataactatcaagtgattctgatttaacgtaaattgctatactcatctcaaattcctgcattcggtaataaaacgttcaacttcattattcttggcctttatcttgtctttacgttcctgtaaactacttttaacaagattaataatgatgcctacagtacctccaccaataataccaccaataatacttacaatagtagatgctaataagatagcgataatatctggtacagcaaaggcacttactttagtactaaaaaaccataccgacggtacaaatataatccatcctgttatccattggcacttattgaaaaacttttcaagctcagcttgggttgttcgtattacttcatcgataggttgatatccattaatgtatctgttcacgataatacctgctggtttgtcgattttaaatgcttgacaatggtgtttcactaagtaggatggacatcctgtccaatctactgaatagtatgaaataccttcgtcgccaccgtccatgtttgaccagtgaattttctgtatcattaccaaccttccatagggaattccagataaacttgagcgttgacacgaatttcattggtaatctttttaactcggtccgtattacgagatacacgtccgaaccaacgccatccattactaattgcacgagaaccagtgtgccatgtttgccaatcaaactgaagaagagtacggtctggagcttcccatttctctagttcgcctttttcgattttttcgaggacttctttgtgccactggcgatagataagttcgccatcaggaatctgactgaactctgcagttcctgttgcaaaatgagtaggacacacatcagcgttaacaagaccaagaatatgttcagacaaatagcgaggattgtcatagtcaggtggtcctgcagtaataaagtgttgaccaaccggaatatctgggcgtggtacatcgtcatggtgataacctgggatagcaggataccaaccaggcatcagcatgtggactcgtgaatcaaatactacatccgagtctttccaatcgtcagggagattttggataaagctacgagtaattggaccgccgttatcaaaagcaaaattcaaatcgcaattaaagaacataggctcgtttttaatctggtcgtttttaatcgcatgagcaaaaccacctactgcacgagcttgactattaaacactttagaactattcatattattttcctcgacattctttaatgaaattttctagattggtagattcaatagcttttttacgagcttctgcgtgttcttcttcagacaatttacgtttataattgacccagacattatggtcgaaactagtcgtggcatataataacaatgctccaacgaatagcaaaaacggcgataagaatacaaaaccaggaacaccatccatatcgtaagccttttgtaatactgcaacagaaagggctgcgtaaaaaagtgatgcaaatattgttaaaagaccaattcggttggtttcgcctaatttcataatattctcctcatgtttaataggactactataatatagtcctataattgtgtaaacagttttgcgaaattatttgaaaggttttaccatatggaaattttgtttgaaacgtttgacgtaatcgtcatgtcctaaactttggtacatacttactactttgctgtagttttcccaggcatactcacggaaccaaccagaggtgatgcttgtacagactttttccaatgccatcataaaactggcttcagggttaattttaaagtcattaggaatttgagaacgttctaatgctagtacacatgattcttcgtatacaccagccaatttgaccatttctggtaatgattcgaacttctcgcgtgaggtcatgacttcagagccgtctttcatataaaatgtatacgctggacggtctgttagtgcaatggcttcatgaatagtatcatggtcatatgtatagatgtcatctttaaagaacgcacttttagaagtgtcaagaaccgggtgagcatagttcaaggtttctttctggcgtttcagcataatttcagtaagttcatcgttcagtgtaacacctttaccacgaagatactgaatatggttcatagtctttaaaaagaatggattatttttcttgaaacgatgagacatcttaattgcaagacatatctcaggagttgcccagtaaaacccgttcaaacggtctttagtcaaatttttcttggcgtattttaaaaggtcataagaagacgtgaaatcttcaggagtgagttcaccgattaattcacggacattagtgattgccggaacaatatatgcttcaaaatgagtttcgcgtccattatggaagcatttgaaaacttggacatcagggttatcttggtgaacatatacacccatcatttgatttttgaatgcattccaagaacattggtccgcaataaagtcccaatcgctatttttgatagcgctagaatcaataagaccgtgatagtgaagtgcacgagaaccaataaccaacatcataatattttcctctgattaattcattaacttaaatttcacgacatgcgatatcatattcatcccagaggtcatcgtgtgaagcctctaccaatggaacgattgtgccgtttatgtcttcattataagggcaaattgtacagtgcgcatcttcgaatcggatgcctttgtgttcagattttttataacgcatatcgaatatctttgcaaacttttcacgagtaatggttttagcaaccactttggttccgatactttcgtaataaatcattgtggactccatttaatttgataggactactataacatagccctatcttgttgtaaactgttttagcaagaataactagatgatacccagccttgaacagtaatactattatttgataacgagattgcgtcctggagattcagacctgcgttatcttcaatccataatgtaacttcttcgcgttcttctgttgcaatttggaacaggttttccagagcagctactgccgtacgtacagcacaatctaattcgcgagacatattgtttccttagcaagtgtgagaagatgcgacccaaccaccagtttcgaggctcaggttgtagtcgtattggtaaacgtcagcccattcagcatagccgttttttgtacaacgttcaagatcggctttaagatgtccgggtgaatgataggttccacccataccataagctgggtacaagtcgaatgttgtgttttgtttatcagcaatttctttggcagcctcaatagctgcatagatttttgctacagcttcagtcagttcggtttgttctttagacataatgattccttagcacaacgcaggagacgaaacccaagcaccttcagtaataacgtaaccattaccttcacgcttaacatcgccaccattattttcaatttcatttttcataccactgggatacgatttcacccttaggataataagtacgaccgctaccataatcacctacagaaaatgatacggcatattggtctgcgatctttgttgcttcttcttcgatacgttcagcttgattcagaagtttataaattgcatctgaagcggatttggcatcattaaattctggtactttaatttcgataatcttactcattttctacattccttaataaagttttctattgtttcattttcacgtttagctaggagttcattataactaatcatttgagaagcgtaaacctttttatttttcttgttatggtttataaaatcgtagtaaaaatagactacagtacaaaatgatgcgatggatgcaaaggcttgggtataccgtaagtcctgccattggtctgtgaatccgccagtgtttcctataaatcctaacacaacgccgtcaataagaaatccaactaatccaaaggcaaatcccatgccaatactcataataaaaattagaatgttctcaccaagagaaggccatacggttaagagttgaggcttttgcatcttatttccttaacgaattccatagcttcttcatattcatactttttaacagcttcatcatactgagcttgggcttttgcgcactgaactttccactcacgaactcgagctctgtgatgacggccttggtgccaatatcctacccaattaataggcattaataaaaacggtacaataagtggtgcgacgaacattaatgaaaatgctgcatcagacgatataacttcactagaatctaaaacagctcctataatcataaagattaaaaatgctaaagctaaaatagggccaaatagtacttcattaggaattaatttacgtttgtattcgtatgcccagggcttacttggcatgtatagggttggctttgacatattctctacattccataataaattgctcaaggattaaattgttagtgaaattaggactaacaaccatagtttcataaagcgcatcaatagcacttaaagcatcaactcttttaagcaaaggcttgccttcatacatagtttcagaatcgatgattaacgtaaagtaatattttttattatcgactagaacttctgtatcgatataaaacatattagacctcagaagcttatctctaaaaccataataatcttcagagcgttcgctgatatattcccattcagtgtttaaacaacaaacagaccatgtaggagcaacgaaatcagtgaatctaatatcatggtctgcaactagtttagcaatagctccgatatcatgaatcataatacctggggctaataaagattttctgctatggctagccgttttctcggtggtctcataagaagacgaccagtaccatttacgtccggttgcaacatatcgtaatgaatcaactaaagacgtaggtggatttaccttatctcggaactcttcaaacattgagtcaatatcattattttggtttcgcatgttaactcctttattatccaaaaggaggaccggagtcctccgtattattttatttcaaagagttaatatattcttgtacatcagcagaagtggtttcgacaccagctggagtgccattgaacgtttcaacacgagtcagagtgtcttcgatatcaaccttagtcagtgcagcgatttcaattacatcatcggccgtagagataccaagggcattggctgctcgagtttcacgaatgtattcgagtttgattgccagattctgacgagcatcatcaagttcaaccaccttacgagcaatttcaattcgcatagcggcatacccgtcagcttttgtattaagttgttcggcagttcgacgatacagaagaccaagcttagcatgcatggtaacatcttgtccttcagccaagagcttacgaatttcacgttccttagaagcggcttgcttgttcttttcattaacaagttcgcgaatacgtttttcttcattaatagatttaacagaagccgtttttagttctttgatttgggtaatcaacttatctgcagctgcgttatactgttcttcgacagtcagatttttagccatagcagtacccagtttagtgcggatgaattcaacaagtttcttcagtgtgttcatattattacctttcaattggtggtttattatccaacgagagcattatactctgctctcaagagtttgtaaattattttttaatcaaattgacataaaacttggcgtcttcggggtgcatgccttcgcagtattcttcaaccatgaacttcttaacagcttcataaggaccactcagattaagctcagttgtccagaacttggaatcttggactgaatcgatacgaacttcagggtgtcggttgcgaataacttcttcggtgtattcataatcaacgacatcaatactaactttagccattttgtattcctcgtgttttgataggactactataacataaacttacttagatgtaaattatttcaacgtcacctttagctgctttataaccttcagcccaagatacaacagagtttttatctgaggattcaaattcaggcattggactttcaccaatattcacacagtatgtttcttcattttcatcgaaccaaataattaaagtagtcattttgtttactcctctgtagttgataagtctatagtatcaccatccttggtgcttgtacatcattatttttaatttttccaacttaacaacttgtagtgtccttcattcatacgtggtttatcccaagaaatactaatatatgattcactgtcaatagaagtcgccgggtttttctctaccgtaagaccttcactttccagccattcaatagtatttgcgcataaatcagaagaacacctaatcggaaaccggcaagatttttcacctttagctgcagcgttatacatcttttctaaaatacgcttttgcacgtttttaaaaatagtttcagcagattcttcagattttttattcagttcagtataaagactcataacattcttctcattaatagggctcataatatctcaatcataagcccatgtacgcgtttatttcatattatcgaaatattcttcagcgatttcgacattattatggtaaactttagaagacagtttaacataaccttcagcagtgaacatgttaatcacaacctttacagtataccactgaccatcttcattacccattactgcgtaagtttcaaacatcggatggtcaggtccaataactttaatatcattcaccgtacgaccgaaatcttctggaacgcatttcataaagaagttgaacagttcaccataattatccatttcattctccaagttttttctgtatcggtagttgatagttgtatagtaccacggaagaacagggatgtaaacagttttgtgaaaaaaatttttaaaaagttttgtggaattctagggcagggagaggaaattaaaaggtaggataatatattataaagggtataaactaaatgatgcctagagaggcccggaaaggcctagatacaaaaaagccctatcatttagatagggatttaaaattatttacctagtttagttattatagcttcggcagcagcttttagcttagatgcagtgttaatacgatttttaatttcggtatacgcatcgccaagaacatcaaggctatcagaataaacacttacactattgcgttcgctattttgaatagaacctttagttttacgatcaaaatcagtgtacacgtcttgaagacacgggctgccttctttgcatcatccaatgcatcaagagctttattcaaagcattgacatattttttagtgtcaaacatattcttagaaattttaacaggtgcacgttcaggagtagctaaggcggatttaggaacctgcgtgccagatgccagtttcttagaaattttgaaaaacgctttattgaaactattttcttgactcatcgtaaaagaactagtatcgatgttatacatttcaatagctttagctttccacttaagaaaatcgccacggtcttttggatccaagtggaagaatactttagtaagatctgcttcagatggtaattttgctgcttcggttaaaaattcggcataggttttcatttaaaatccttgaaataatttatcggttggttattaattatttattactttgttattatcagtaacagcattctctgagtgattcaaactaaaaagccccaacctttcggaaggggctaagcctcgcggcaaccttgtcggggttccacctgctaaggcaagtgtttgtacgaaacgccgggattcgaacccggttattaagcagttgacgctactcaatatttttaaaaggccatatctcgaccatatccgaacgttccgtcaaaaacgctactcgacttacggcaaagatatttcctcgaatcgataattcggtgcgccgtttctgctgtgatgtaaggggatattaacgaatcataaagatttattaagaccagtccttactcagggaacatcagtccgacgacttaccggtagcgacccggcttcttattttgacatattatcaatttgctctcgacgccgtcgccatagattaatcgcttcattaacacattcggcgtttggtatatgacggcaataatataatgattcgcgtttctggaaccgatgttgcaatgggatttcgtttaaaaggtctttacggtcaaagtattcaaaactagttaacccggaacggtttttaagaaacttccaatgtccgaattcattttgaaaataaacataatcagcatgttgatataatgaattaattaacctatcggaaataactgtttcacgttcgttaaaataaaatgttaaatcatgaactactaagtaaacattgcctttcatattttcctcacttaaagttggtcgagacagaaggattctaaccttcaacctacggattagaagtccccgttgctctatacaattgagctatgcctcgaatatatgacccagaccagattcgaactggtaacctttcccttatgaggggactgctgctaaccgttgagctacagggcctaaataactttctattatgaaaggcactttagagtacctttggtaatagagggtatgaattaataataacacataattcttaaagcaaatcaatcattttaacagttggcaaaacgatttcttcttcaatataagcaaattcaacacattcaactacacgcaagaaatcataatcataatattcagaagcatgaccaagaataccaatgagaccttctgataccaaatatccattctcacgaaacaggtcgaatacacacgattcgtcttcttcagatttattaccaaggtcgacttcaatatcaaagacctttttaatgaattctggataaagctggtctgagaacagtccttcaaccaagtattcatagattaaaagcgagcaatcactgaatggtgtattaccgcaataacgttcggctttggtgctagaatgacggctcttaaatttcttcaagagatatttaaactgttggagctcatgctcttccacttcaaacaatgttttggttttatagttgtcaccatcattttcataggtagtgacatcaattacgtaacccttaggaattgtactgcctaaacaaatattcatttactcaccgtaccatattaatgtaattatattcaatgcaacgtaatttcaaaggattcttgaaaatatcatattcaagagggcctttttctgtttcaataaagaaatcaaagttaactgtgttaaatttatcgtcttcacagagtaatttaacttgcgaagacgaacggtcgatataaaccttttcaacctcaaagttagtcagaataccatagtcattaactagtgctttagctgcacgttggtcgctttcatatccgttctcaatggacgatactttagcataaagaatcatgaatgttccaccacttcaaaggtatgagcatcaacaatatgataccagtcaaaattttcttctgcgtttttataaatttcgcgaagagcttcaacagtttttcctgtagcaacaagatcgtcaataccgccaagaggataacagtcgtaaccagcaaacagaaggaaattaatagtttctgtaggttctggatgcagtgtaccattgtcatcgactacttcaaagaacatataaccaggcgatttagatttaatccaagcccatgcttgagctgctgaatcaaatggtttgcgtatcaaacgacaatcagggtctttagaaggatttgcttcaaaatccgcatatacgtgatatttcattttactcaccttttgcaattttatccataacaatagcgattaaaccgattagaaatgctactaccaatgagatagagttttcagttgttgtcagtagtccacaaatgaatcctacaaacatcgaaaaactaaaagccattgaagcaattactacagcaacattacgaatcagttcagcgcgtttcattttatttctccatttactcattttgttttgataggactactataacatagtcttatcagcatgtaaactacttacagaagagtttttgcaataattttaagctgagctacagaaatatgcttagctttaaacagtgcagtctcttcagccggagagataacaatagtagcgccatctttcttagcagaccatccatcccctaagtaaacagtaccttttacttcttcgccgtcaaccagactaatcattggtttaccctcacgtcctttatttgctttaataacttcggaagtaagggttgcttcggtcagagtagaaacgttagcaacaggtgatataaattctttataggttttcattttaggttccattttgttgttttgataggactactataacatagtcctatcgtgttgtaaaatattttatgcctttagatgaaatagtattctggcgtttgacccctgtttgtgaaaaatcatggttatcaatttggtcaactcgcataacaccaaatgcagatttaattttagcctttgaaccttttttgatactaattaccatataagtatcatttttcttatattcgaaatttgttacttcaacgccttgattagaaattgacttaataatagcattagcgtattcatcatctaacggaccgttagtgttaataacaaaatttttatctgctttagtagcttccgcgatgaattcttgataggttttcattttatttccttgaggttgtttatttgataggatgatagtaacacaccatcatccttatgtaaactgttttgtgaaaattattttagatcttcggcccaatctagttttaagggttctttgtattcacggtcgagaataaccggaatagctacatcaccactgaatgatagttggccaacgttatatgataacgttatatgtggagtgtagtcgtcgaaatcatgagtagcacctaaagctcgtgcgtactgatgacgacatctaagatattcggaatcaagaactaaaaccagtacagcgccgtcatcggttttccatacctcaaggtgtcctgattcggcaacagaataactaccactagatgtagtatatggtatgtttacacgtgaataacaaattgttgaatgaagcttttcacgtggtactggattaggaattcttaatttgcgctggaggtcttccagcgcatcaagtgttaattccgaaaatttagctgcgacgtagaggccttgtgaaaagtcctcaaatttcattattcttcttctgtggtttcagctttaacaagttcacgtactgcttctaccaggtcttccagtttaacagattcacttgtaataccgaccagttgagcaatctgagctagggtattctgaagaagtttagaatcgtcagaaatacgagcggcggcatcttgggtatcaagaatacgagatttcagaattacgatttcagactgcagtttttcaatagtttcagtggacattttattaccttaagattttttcaattttagaataaagctcttctaacgagccgtcgtttgtaataactaagtcgccttcttcaataggcaacccagcttctgtaatatgtttatcagtggattccgtaccagagcgaaccacatgaataactgtagcacccatcgctctagcggtttccatttcatggacttggcgtgtatcggtcacaacgtagtaatcgaaatcacttccaatataatccatatagtttaatgcaaaaagcttaacccaatacatacggtcaaataaattaacgacaacatccgtaccgagggcttgcataagacggcggattgaccatgtgtcgttgatattatttatagcttcacgcagggcttcatatggtttaatatctagatatgaatacccaccttctaatgatgataatatgttaacaccattaattggcaggtattgtcgttgtaaataaattagcgtttcttccattaattcaataacatccaatttattgagatttaatggtgtttcacggtcgtatccaatgccttcaaagtattcatatttcaactcggtgaatacatcagggttttcggcatgtttacgctcccaagctattgctagagcgtctttaattggatatgctaattgatattttatggatttaaagtttgaattgatgtaatcagcagtagtgtctttaccactacgtttgatgccgcttaaaaagattagctccataggtttttcctcatataatttatgaacgattataacatatggagctagaagcgattagcgcaaggaagggtgtctagaaatggatttagattcgaccgcttgacgcggttgttgagatacaatgacttcaccatccttttctatcgtcatatacgcatagtgaatagttgctacgcacgtaacggcagggtcggagtcttcagtgtaactaaattcaatttcgctcaaatcggaaatccatggtttatagaaatttgccgtcaaaaccacttcagtcttattgttgtttaaaatgtgcaaagtaacaaactcaggaccatcggcatgggctgtattatgaccagttatatagttattagtgctgagcatccatttatacatgttcatccaggacgtcatgtcttcatcaactataaatcgtacaataaaagggtcatattcaaatgtagtgcctgcacgcattgcacgtcctaaccccattgtgcctgtcacagtttcaacaacaggaattctcacacctggcaatggtgccgtttgggcattgagcacaaaacctgaagttcgtgtactatctgggatatccacaacaaagtttgttatatttgtttggttaaaaatctgtctcgttggacgagtcataagcacctcaaaaacgctttaataaaaatgcagtataatggttttaggtctcttccattaatctggttcaacagaatatcagaagaacggaagagaatagaattaagatttccaaacagtattcgcagagaaacgttttccttttgacataaactgctgagtaggtaacatgattatgttagcccagtctttaggagctatttctgttattgttcctctaatgtggcctggcaagtatgctttaatcattttgtccgcaccttgaaatcctttcaccttgctccagtctatcttcaactttgtgttattagtaatagtagttgtgctagcatattgcttcagcaattcttcaagaaactgttgtcgtgctttaggtgggatatagtgcaagtttaacccgtacatcaaattatgtttacctaatcctaaataaataatcaaaggatatcggtcccagtatggcagagtatctttatgtttagcatcatacacgtaagtataaattttgcctggcgcaggcttgactactttatgaccttttacacttttcttaattgtttcaacaaaccacttagatgatttgttgtttactgctgcgccttcatttctaatcttttctcgtattgaactgcgaaacgagtttatcatcagaagttgacgttcttgcttattgagtttatttttaggtttagattcaagcgtttcaattttctgtgcagtcttaatagatgatgcatatctagacattgcagatgtaaacgacgagtattttattccttttgattctgcaaatgcttttgcagtgattcctttctctttagctttcttgtattctaatcctatctcaatccattttctttcattcatagactgagcaatcttaggggcttgtacgccttcagatataatttggaatatgctcataattaccccttgtatccgagtttcctaagtccgtcttcggttagaactcgaaattttatatttctcttttcagcaacagctgaggcagctttccatttgtcacagttcacagaccacacgtagatctcattcatataacgtttctttgctgcggtagtaagatttgcaggcttaataggtggttgagtttctttctttggttttatttctacaaagaactcttgacctgatgcatctttcatccatatatccataaagtatcgacgttttttaccttctgcgttacagaaatatggaattactgctgtttcgctgccccatgcaataatttctggatttttatctaaccattcgaaaaagaatttttcccagtttgaacgatacgttattttggtatggtctccacggtatttttttaaattttttgggacccatttaccagagtaggccatgttgtcctccttataaatagtattattatttataccaatttcatattggaaggagactattttgttatttacattcttcgacccaataggatatagtgctaaaaccattaataagaatgcacctactattcctatgacagacatatttcgtaactataaagagtactttaaacgtgttgcgaccaactatagattacaaacttattatattaaaggttctccgcgtcctgaagaactagcaaacataatttatggcaaccctcaattatactgggtccttttgatgtgtaatgataactatgatccgtattatggttggatcacatctcaggaagcagcgtatcaagcttctattcagaaatatgcaaatgccggcggagaccaaattctttatcatattaacgaaaaacgcgagaaattttataacttagtttcatatccagatgagccattagtatggtatgataaaggcgacaaagctcgtaagtatccgcaatataaaggacctttagctgcagtagatacttatgaagcggctgtactagataacgaaaaacttcgtaaaataaaaattgttgcaaaggaagatataaactcgtttatcactgatttgattcgtgagatggagattgcataatggaaatgattagtagtagccttaattggttcgttggtgttgttgaagacagaatggacccattgaaacaagggcgtgttcgagtacgagtcgtaggcctgcatccagcacagagagcacaaggtgatgtacaaggtattcctacagaaaaacttccatggatgactgttattcaacctattacatctgcatcaatgtcgggtattggtggttctgttacaggccctgttgaaggaactcgagtatatggtcatttcttagacaaatggaaaacaaacggtattgtactcggtacatatggtggaattgtacgcgaaaagcctaatagactcgaaggtttttccgacccgacaggtcagtatccgcgacgtttaggtaatgatacgaacgtattaaaccaaggtggtgaagctggctattattcgaactctaacgtaattcaagataacaacttagattatggtataaacccagatgatacagatttagcaaatattcctgaagatgatgaccctaattttacaataacagaaatgttacgtcgtgacgaaggtcttcgcgataaagtatattgggaccatctagggtatcctacagtaggtattggacaccttatcgtaatggaaaagacccgagacatgtctcgaattaataaattgttatccgatcaagtagggcgtgaagtaacaggaaatcccgggactattacattagaagaagcaacagctctatttgagaaggaccttgctaagatgcagaaagacattcgttctaattctaaagtaggtcctgtttatgctaaaatgaacaggtctcgccaaatggcattagaaaacatgtgcttccaaatgggcgttggcggtgtagcaaaattcaatactatgcttaaagcaatggccacaggcgattggaaaactgcatacaaatctggacgcgattcgttatggttccaacagactaaagggcgtgcttcacgtgtaacaacaattattttaactggtaacatggaatcatatggcgttcctgttaaaacaccaccttcaccaggagtcggtgccgatttagttactagaaataccgatccagaagacccggctggtcctcctgttccattagattcacgtatcctttttaaagaaccggaatcaagttatcgtggtgaatacccatatgttcatgctatggaaacagaaagcggtcatatccaagagtttgacgacactccaggtaacgaacgttatcgcttagttcatccaacagggtcatatgaggaagtttctccgtctggtcgtcgcactcgtaaaactgtagaagacctttttgacatcactaatggcgatgggaatttcctggtttctggtgataaacttgttaacgttggtgctaacgaaatatattataacatggcggaccgcctccatcaaatagatggcagcgacacaatctttattcgtggcaaccaagttaaaactgttgaaggtgatggaactctttacgttaagggcaatatcaaaatagtcgttgacgggaatgcagatattcttgttaaaggtgatgctaagtctcaagttgaagggaatcatgactatactgtcaatggtaatgttaaatggactgtcaatggtaatgttgatatgactgttgctggcaattggtcggagacaatgactacaatgagctcaatagcttcaggacaatatactgttgacggatctcgtattgatattgggtaatatatggcacaaatacttcctttaaataccgacttaggagaagacatggaaggggcgtctattgacgtcctttttactccacagttagaaactaccgaaactttggtgtcaataaatataatagattatgaaccaacacaaggcattacagttgacggtaatcacttatatggaacatatgaaagcgtatttagcttttcttcagatgcattgaaatatcgattaaacgatgattttaaaactgcatcttcatgggaagatttaccgcaagaccaaagcactcaactatatttgtggagagctcctcagaacctccgtaaagtatttagttatacggttgaaatgatttataactaccaagaagaaggttcatcaggcggctcaagaagtgactctagtacagaacctccgccggctccggtacaaaaaactcttactaaggtttatacaaaaactatagtaggaaattggagcaaatgggctcaacaattacgaaactatgtttatgcgaggccataaaaatgtctggcttaagttacgaccagtgcgttacaacaggtcatgaagcatggcctcctacaataattaatgcttctcaatctaaagtattcaccggcggtattcctgttcttgtagcaggagaccaaataacacctcatacagaaattaaaaaaccgtacgagactcatggaggtgttactgaacctcgtacatctaaagtatatgtcacaggtaaaaaggccgttcaaatggctgacccaatttcatgcggggatactgtttctcaggcctcgtcaaaagtctttataaaataggaattaaaatggcaaacactcctgtaaattatcagttagtcagaacggcgaatgctattcccgaaatttttatcgggggcacatttgccgaaattaaaacaaatataatagaatggctcaatggacagaacgaatttcttgattatgattttgaaggttcgcgtttaaacgtattgtgtgaccttttagcatataatactctttatatccaacagttcagtaatagtgcagtgtatgaaagctttatgcgtactgctaacttgcgcagttccgttgtacaagcggctcaggataatggatatctgcctgcatctaaatcagcagcacaaacagaaattatgctcacatgtacggatgcattaaatagaaactatatcactattccacgtggtactcgtttcctggcgtatgctaaaggtacttctgtaaatccatataactttgtttccaccgaagacgtcattgtagttaaagacaaaaataatcaatatttcccacgtcttaggttagctcagggacgtattgttcgtactgaattaacatttgataaattaaaacctatcattattcgtgataagaacatcgaccgtaatttggttaaattgtatgttgacggagcagaatggattaactggactcgcaaatcgatggttcatgctggttctacttcgaccatttattatatgcgagaaactgttgacgggaacactgaattttattttggtgaaggtgaaatctctattagcacatcagaaggtgctttaacatccaactacattggtggccttaaacctgtccagggttctaaaatcgtaattgaatatatttctactaatggtgctgaagcaaatggtgcagtaggattctcttatgctgatacattagctaatatcacagttattggaattaatgaaaacccaagtaataaccctgacttcgttggtgcggatggcggtggcgaccctgaagatattgaacgtatccgtgaattaggtacaattaaacgtgaaactcaacaacgatgtgtgactgcgacagattacgacacattcgtctctgaacgatttggttctattattcaagcggttcagacatttacggattcatctaagcctgggtacgcatttattgctgctaaacctaagtctgggttatatttgacttccgtccaacgagatgatattaaaaattatcttaatgagtataacttagggacgataactcctgttgttatttctcctgattatttgtttattaaaatgaatattcgcgttacgtatgcattgaacaaattacaagaatctgaacaatggttagaaggccaaattattaataaaatcgaccggtattatattgaagacgtggaaatttttaactcgtcattcgcaaaatctaaaatgctaacgtatgtcgatgacgcagatatttctatcattggttcgtctgcgactattcaaatggttcgcgaggtacagaacttctacaaaacacctgaaacaggtattaaatacaataaccagattaaagatagaacattagaatctaacgtgttttcatttgatagtttacgcgttgaccctgaaacggaagctactattaaatatgacgttcgcattgtaggttcagatagaaatgaccgtggcattggacaagttatcattggtccgtttgcagatggcgacgttatagaaaatgcttatattcaaccatatactggtgacgattttaataaacttcatgttacggacggaagaaacaaatattactctataggtgaagtaaattatccggctgattcaatttattggaatatagctaaaattgatttaacttctgataggtttgaagttcaaactattgaactctattcagacccagctgatgatgttatctttactaaagacgggtcattaattgtatttgaaaatgacttacgtccgcaatatttaaccatagatttggagcctatttcacaatgacagtaaaagcgccagcagtcacgagtctcagattatctaaattgtccgcaaaccaagttcaaattcgctgggatgaggttggcgctaatttctactattttgtggaaatagctgagaccaaaacagctaatggggaagcaattccccgtaatagctatagatggactaatttaggatataccgctgataacaatttctttgagtctggtttaaattcattaacaacatatatgatgcgtgtggctacagcagcggagggatttgagcagtctgattggagatacaccgaagagtttgaaacatttgaaataaacgcttacacattccaacatatgattgaaatgcaattagctaacgagtttatttctgaaaaatttacaaaaaataatacaaactacgttgattttaataatgacacgatcatggcagcactgatgagcgagtcgttccaatttagtcctgcatacaccgatgtgtcatcgattagaaattttataattggtgaaaatcagtatcatgaaatccaggggcatatccaggacgtatgtaaagatataaatcgagtatatctaatggaatctgaaggaattctttacctttttgaaagattccaacctattgtaaaagtgtctaatgataaaggccaaacatggaaagcggttaaattgcttaatgaccgtgtaggatatccactttcacgaactgtatattaccaatcagaatatacgacgtatttgctcggctatgataagattttttacgggcgtaaatcatccgatattcgttggtctgctgatgatgttcgtttcagttcacaagatgtaacatttgctaaaatcggggaccgattaaatttaggttttgatgtagagattttcggtacatacgcgtcattaccaggaaacgtatcacgtattgcagaagctattacttgtaatgatgactatgtttatattgcggccagagataaagttcgcttcgttaaaaccagtaacgctcctattgattcagatccattatctccgacctattccgaacggttgtttgaacctgagacgtttacaataacaggcaaccctaaagcagtttgttataaaatggattctgttggtggaagaatattcgctcttattattggtgaagtcgaaaacgttaatgacgacccaagaacaaagcctattttagattccgttgataaaggtgtatacgttttagaccatgacgctggaacatttaaaaggatatttggtaataccgaagaagaacgccgtcgtatagaaccggctttcaccaatatgtctactgatggtgttgagctttatatctcttctagtaattttaaatttttagaatctgatattgttgacgacccagaaacgcaatctaagtatggacttttaggagcagttaagtatgaatatcctagagaatggctcgcagataaacattaccatatgatgattttcgcatcaaacgaagaaagtaattgggaaactttttcaccaactcctatgcagtattatgcagaacctttctttagttattctagaaaatcaggcacacgttcttggattaataactctgatagagcggtagtgatttattctgatttgctttacacaaaggtagtggaaagccaccctagcacttcacctgatcgtaaagttcatgaatactggaatgatggtgattgtaagattgttatgccgaatatagaattcactggatttaaaaaatacgcatctggtatgttgttttataaatcatcaggtgaaataatttcatattacgattttagttatcgtgttagagataacgtttctataatttggaagcccactaacgtatttttgacctcctcattacaaaaccaagaaaaagaaacttcttgggttcctgttgaagagacaggtctagctgacccggatttacgcccattactcactacaatgatgccagagtcttatctgttggataatacaaactttgaagcattttgtgaagcgtacattcaatatctttctgatggatacgggactcattataataacttattgaatttgattaaaaataaatacccacgagaagaacacgcatgggaatatctttggtctgaaatttataaacggaacatttatttgaatgctgagaaacgtgatttagtttctaggttctttgagtccagaagttacgatttttattctactaaaggaactgaagcgtcgtataagtttttgtttaaagttctttataacgaagacgttgaagtggaaattgagtcatctgctggaacagagtacgatatcataattcaatccgattctataagtgaagatttggttggacaaactatatacactgctacaggtagatgtaatgttacatatttagaaagaagctattctaaaggtaaattacaatggactgtgactattcataaccttttaggtaggcttttagtcggtcaagaagtaaaagccgaaagactagcagattttgaaggtgaaatagttcgcggtattaaaggtaaagaacttgcccaaaacactatcgattattttaatcgtggtagagcttattacgtcatgaaaataaagtcaaatcttccgtcctctcgttggaaatctgacgtactacgttttgtacatccggtaggatttggatttattgcaataaccttattaacaatgtttattaatacaggattaacgcttaaacatgttgaaactattattaataaatataaaaattataagtgggattccggactgcctacggaatatgcagaccgcgtcgctcgtttagaccctcaaggtaatgtagaattcaatcctgctacaggtgaagtaatttatgatgccggtccttatgctggtatcgaataccctttacctgcaaattataacgaagaaaatgataactctattttccaaggacaattaccgtccgaacgacgcaagccaatgagcccattatttgatgcatcaggtacaacgttctctagatttagagagcttgttaatgaaagattgttagataacgtgggaaatcctagagacccgattaatccaccacaggttaaattagatgaatgattcaagtgttgtctatcgttcgatagttacttcaaaatttagaactgaaaaaatgttgaatttctacaattcaataggtgatggtgataataaaaacaccatctttataacgtttggtcggtctgaaccatgggctgctaatgaaaatgaggtgggcttcgccccaccgtatccaacagactcggttttaggtgtaacagatatgtggactaacatgatgggtttagttaaagttatcccatctatgttagactcggttattcctagacgtgactggggagatattcgttatccggacccttatacattcaaaataaatgatatagtcgtatgtaatacagccccatataatgccactgaagtcggagctggatggttagtataccgttgcgtagatgttcctgatgttgggatgtgttctattgagtctctcgacaacaaagaagaatgtcttaaattaggcggtaaatggactccatctgttaggtctttaacccctcctgaaggccgtggagatgctgaagggattatcgaagttggtgatggatatatatgggagtatctttatgagattccacctgatgtgtctataaaccgatgtactaatgaatatatagtcgttccatggccggaagaagttaaagaagaccctgctcgttggggatatgaaaacaatctaacctggcaacaagatgattttggccttgtgtatagagttaaagcaaacataattcgttttaaagcctatttagactcagtttatttccctaatgcagcactgcctggtaataaaggatttagacaaatttctattatcacaaaccccttggaagctaaactccgtcctaatgaccctaatataaaggctgaaaaggattattatgaccccagagatttacagcgtcattctggtgaaatgatttatatggaaaaccgtccacctattattatggcaatggaccaaaccgaagagatcaatattttgtttatgttctaatttagggagacttcggtctccctttcgtgtataaatagtataaactattaaggattagccacatgtatattcaaactccaaaacaattgattgacgttggcgaaattggtaacgcttctacaggcgatatcctttttgacggcggtgttaaaataaacaatgatataaatgctatttacaatgcgtttggtgaccaacgaaaaatggcaactgctaatgggacaggaccaaatggacaaataatccatgccactggatactaccaaaaaggaggccctactgattatttcacccctgttccagtaggaagtagacacgacatagatgcttctaccggtggtgttattgttactgttgctagaggtgaactcggcgattccgtggaatttataaattcaaacgggtcaatttcggtaaacaacccattaagtatccaagcattagattctattaaaggtgttgcaggtaatttagttataaccacaccttatactaaagttactcttcgttgtatttcttctggtgcaggtggttcaatatgggattattctacagaaagtatgtttagtcataccgaaattcctgtagacgggacatggaatattatttcagactatgtcaatattcctctattttataaaactgaatataatgctgctaaacttttggttacatgccaatctgccaacggcagaaaaattaaatcatgcgaaataaatattctaatagatacaattaattcaagagttatttcaaccgaatacgcagtgatgcgcgttggtaatgataacgaagaagatgaaattgcgaatattagtttttcgataattaacaattttgccactatgacagtttcttcacatataaatggtcttcgagtggcagctaaagttatttcaactcagaaaattagggtcgctcaataatgaaacaaaatattaaaattgggaacgtcgttgatgacggacaaggcgattaccttcgtcgtggtggtgcaaaaattaatgaaaactttgatgagttgtattatgaattaggcgatggcgaagttccatattccgctggtgcctggaaaacataccattcttcagatggacttaatttagctgctgaatggggtaaatcatacgcaattgatacttcaacagggcgtgtttctataaatttacctaaaggaacagtggaagattataataaagtaattagagcccgtgatgtattcgccacatggaatattaaccctgtaacattaattgctgccagtggtgatactattaaaggttcttctagcccagtagaaatcaatgtgcagttttcagacttagaattagtttactgttctcctgggcgctgggaatacgttaaaaataaacaaatagacaaaattactagttctgatattagtagtgtagctcgtaaagaatttttagtcgaagttcaaggtcaaactgattttcttgatgtatttgggtctgtttcttataatgtgaataatatccgtgtaaaacatcgtggtaacgaattatactacggtgatgcgttcagtgacaatagtgactttggttctccaggagctaatcctggagaaatcgttgcattagatggtaaaaacatccgtttaagacaaccatgtaatattggcgacaccgtacaaattgaaacctttttggatgggattacacaattacgcagttcttattctcgccgccaaatacgtattttagattcgaaattaacaacccgtccttccttagaaggaagtgtatatgtcgctgatttgtcaactttgaaatctattcctttttcggcatttggagttaatccttcagaaccggtcaatactaattctttagaagttcgttttaatggtattcttcaagaattagccggtactgttggtttacctatgttcagatgtgaaggtgctgatgcagaaacttctaccgagtgttcagctttaggtgggacttgggttacatctaacaccgattattctattgaatatgatgataacgatgcaactattgcacgtgctttagtctttgaccgtaagtttgaagaccaagacattattgatattacatggtttaataacgatttaggcgctttattaagtatcgatgacattttagatacaactgatgaaaggtatgtcgcacaaggtgcaaccgtaaatgtgaccggcgatgtggctttgaccgatttcaataatatcggatggcctaatgtagaatctgttccggcatatagcagggaattctcatctattgcaaatatttttaacactatttaccctgtcggtactatttacgaaaatgcagtgaaccctaataacccagccacgtatttaggatttggttcttggaaattatggggacaaggaaaagtattagttggatggaacgacgatattagcgatcctaattttgcattaaataataacgaccttgattctagcgggaatcctacacataccgccggtggaacagtcggaacaacgtctaacacactaactaattctgatttacctcctactcaaactgacgagaaagttcttatttccgatgagaacggtacaattattattggtggttgtcaatacgaccctgatgcagaaggtcctatatacaccaaataccgtgaaggccacgccacaacgaatagtacacacgtaccgcctcaagccgtaaataatattcaaccgtcaattaccgtataccgttgggtaaggattgcataatgaccatacttaatactaaagcgggagtaatatcccgcgaagcagattttttaggatttagaaaaaatcctactcaaattgatattttaaacaaccaaggcgtaggttctgtaaccatttctcaattggcaaaaggattctacgatgataacgtagaatctgcaataaacgatgttcataatattgctagagcagatgtaggaacagttacaattaacacctcaggtgtatctcctgaaggaacttcacaggtagattattggtcctttagtggaagtgtaactgaccctagtttgcccgatggaagccctgttattgtaaaagtttacgggcttcctgttaatgctactgtaggtatgacagccgacgaatttgttgtacaattacgtactactctccggaatgcgatttccgaccaattggctattgcagagtataaagatgaccctactgttgggactaaattacaaataacatatttagataaccaaagacacgtactcccaacgtattcctcttatggtatcacggtttctcaagaaatagtgtctcaggctaagtccgggtacggcacttggaatttactaggtgcgcaaaccattactcttgacagccatacttcacctacaaccttttattattttgtgagaaccgcatgagtaacaatacatatcaacacgtttcgaacgaatcagtatatgttgaatttgaccctaccgggtcaaattttgatagttcaataaccaatgtccaggcagccttagcctcaattagcgcatatggtgttaaaggtgttccggacgcaagcgaagcagaaaaaggtgtaattcaattagcgacagaacaagaagttcttgatggatttaatagtactaaagccgttacacccgccacattaaatgcaagacttcagtatccgaacgcgtcagaaacacagtacggcgtaactaaatatgcaacacaagaggaggccattgctggcactttagacactgtttctattactccgcttaaattaaaccaaactattgataacacgttctctactcgttattcaacagaaacaactaacggtgttattaaaattgcaactcaaaccgctgcacttgccgggtctgatgacaccacagcaatgactccgcttaaaacgcagcaattagcaataaaattaatttctcaaatagctcctaataacgacccggcttcagaatctattaccggtgttgtgcgtttagctactgtggctcaaacacgtcaaggaactcttcgcgaaggatatgcaatttccccgtatacctttatgaattctgttgcaacacaagaatataaaggtgttatacgtctaggaacacaagcggaaattaatagtaatttgggagatgttgctgtaacaggtgaaacgctaaatggtagaggagctacaggttctatgcgtggagtcgtaaaattaacgacgcaggccggtgttgcacccgaaggcgatagctctggagcattagcatggaacgcagatgtaattaatacacgcggtgggcaaactattaatggttctttaaatttagatcacctcacagcaaatggaatttggtcgcgtggtggaatgtggaaaaacggtgaccagccagttgcaacagagagatatgcatctgaacgtgttcctgttggaacaattcaaatgttcgcaggtgatagcgctcctccaggttgggttttatgtcatggtgggaccatttctggagaccaatttccggactatcgaaatgtggttggaacaagatttggcggtgattggaataatcctggaattccggatatgcgcggcctttttgttagaggagctggtactggcagtcatattttaaataatcgtggccaagacggatatggaaaggatagattaggtgtaggatgtgacggcatgcatgttggtggtgtccaagcacaacaaatgtcatatcataaacatgccggtggatggggcgaatttcaacgtcatgaggcaccgttcggagcatccgtatatcaaggttatttgggtactagaaaatactctgattgggataacgcatcatatttcacaaatgacggcttcgaattaggtggtcaccgcgacgcaacaggcactcttaaccgtgaaggacttatcggatatgagactcgtccatggaatatatctttaaattatattattaaagtccattactaagggtaaaaaatgatcgaattaaaaagtctaccatatgttgatggccctcctgacgagggtcaaaaacgtttaaactggattaaaaattcagaagaaataactggcgctgatacgttatacggttctgaaggagtaatgaaccgtccaataacagaagttcaacgaaatgtagaaacaattaacgataacgttaagactatcgcagaatctttagataccgctaatgctgatattgtcacaattaaaagtatcttggatgtttctggtgacgtggatgctttagcacaaattggacataacactgatgatattgaagtattaaaacacactgtaaattcacacggtgttgatattttaaacactgaagaaaaactagatgatactattgctaatatcggagtagttaatccagaaacagattcggtgtatcgtacggtgcgtaacgaccttctttggattaaaaccgaattagggcaatatactggacaagatattaacggtgtcccaaccgaaggtaatgaaagcaccgggatgaaacgacgtattattactaacagttcagtgttggttgaccaaggcgttcgtttaaccgagttagaaaataaatttgccgattctgatgttggggctctgacaaccgaagttgaaaacctccgtcaagaaataggtcctagaccatcgttaacagtaccggtttacactcgtttatccggtattgattcatccatttctatccaaactagagatattgcggcattaaaagattttgttggatatcctaattcaaccgctattaaaactcaagtcgaggccaatcgtctttctatatcaacaataaattcagacattaactcgcctggcggtattaaaccacgtttgacaacgttagaaactactataggctctccagatttaccaactactcttcagggtaagatcaaattaaataccgattccatttcaggtattaacacagttttaggtgttgattcttctagtggtttacgttttaacgtagcatggcttaatcaggtggttggcgttgattcaaatggtggacaacctgaaccggctggttcacttttatataggactcgtattcttgaaactggtgttactgacctaggcaataacattcaaaacgttcaaaccgaattgggaactaattcgtccggtattaaaggacaagtgactagtttaaataaacttataagcggcactaacccaaacggtcaaaccatagaagaacgtggtatattgccaacagttaaaaaccatgacacatcaattatggctttaactacgcgtgttaccactttagaaaccgaccttgctgcagcagaagcagaaattcaggcccttaaagaggctggatatatcgaagatgctccttcagacggtaaattctatgttcgtaaagatggtgcttgggttgaacttcctacagcttaatgaaaagggccttcgggccctaaaggatttatatgtcaggttataatgcacaaaaccctaaagaattaaaggatgtaatattacgtcgtttaggcgctcctattgtaaatgttgaattaactacagaccaaatttatgattgtatttccagagcattagaactttatggcgaataccattttgacgggttgaataaaggtttccatgtattttttgttgatgacgaagaaaaataccgtcacggcgtatttgatatgcgtggttctaatgtatttgctgtaacaagaattataagaacaaacgttggctctattacttcaatggacggtaatgcaacttatccttggttcactgatttccttttaggaatggccggtgtttctggtggtatgggtagtaattgtggtaaattctacggtccgaacgcttttggtgccgacctcgggtattattctcaattagtatcttatatgggtatgcttcaagatatgattgctcctcttccggatttttggtttaactctgcaaacgagcaattaaaagtaatgggtaactttagacagaaagatgtcattattgttgaatcatacgttcgttcttatattgagacccataagatggtaggaaatacagtaggttatgggcaggtcggtcctcgtgattcatggtctatttctgagcggtacgacaacccggaccataatttggtcggacgacgagttggtgaagatcctgcaactaaacaaggcgcatataacaaccgctgggttaaagattatgcgtctgcattagctaaagagcttaatggacaaattcttgctaaacatcaaggtatgatgttaccaggcggtgtcactgttgatggtgttcgattaatcgaagaagctcgattagagaaagaagctttacgagaagagttatatttactagaccctcctgcaggtattttggtaggttaatatggcgacttatgataaaaatcttttcgccaaactagaaaatcgtggcgggtattctcagacaaatgagaccgaaatcctcaatccatttgtcaattttaataactatgagaatagtcagacattagctgatgttctagtggcagaaagcatacaaatgcgtggtattgaatgtttttatgttccacgtgaatatgttgctgtggatcttatctttggtgaggaccttaaaaataaatttactaaagcatggaaatttgctgcgtatctgaactcttttgaaggttatgaaggagcgaaatcgttcttcagcaacttcggaatgcaagttcaagatgaagttacattatctattaacccaggtcttttcaaacaccaggtcaacaatcaagagcctaaggaaggtgatttaatatacttcccaatggacaacagtttgtttgagattaactgggttgaaccatacgacccattctatcaagtaggtaaaaatgcgattcgtaaaattactgcaggcaagtttatttactctggcgaagaaatcaatccggtgcttcagaaaaatgaaggtatcaatatacctgaatttagtgacttggaacttaaccctgttagaaatcttgacggtatccatgacattaatatcgatgaatattctgaagttgagcaaatcaattcagaggcaagtgaatacgttgaaccatatgtagtagttaacaaccgcggtagacaaaattcaccatttgacgatgggtttatgaattaataaataaataagataaagcaaacaccggtcgaaaggccggttaggagaaatgatgtttggttatttttacaactcgtcgttcaggcgatatatcacaatgatgggcgatttgttttcaaatatccaagttaaccgtcaattgtctacaggcaataaattaattagagttcctattacgtatgcatctaaagagcactttatgatgaaacttaataaatggacctctataaactcgcaagaagatgtggctaaagtcgaaactattctaccacgtataaatctccaaatggtagatttcgtttataacccaacgtttaaaacgaatatattgaataactctcttttgagtaaatcgactaaggatattgtagaccaatacaacccatcaccaattaaaatgatttttgaactgagcatctttactcgttatgaagatgatatgttccaaatcgttgagcaaattattccatattttcagccgcattttaatacgactatgattgagcaatatggacaggatattccatttgaaagggatattaaagtcgtatggatggcagcagcaatggatgaacaaatagacggtgataatttatctcgtcgacgtttagagtggtcattaacatttgaagtaaatggatggatgtatcctccggtaggcgcagctgaaggccttattaaaacgacttatcttgattttcatgctaatgaacgagaccttcaaacagccgccagtgtttttgaatcagttgatacagaaattaaaccgagagacgttgaagcacaagattggaatggtgaagttgaacaaacctatactcatgatattccaatcccgactccaccaacccctcctggtcctagaaaacaataagaggtaaatatggaaggtctagatattaataagcttttagatatctctgacctccctggaatatctggggaggaagtagaggtatatgctcctttacaattggtggaagttcaaagtaatcctcaaaaccgcaccccggatttggaagatgactatagcgttgttcgtaagaatatgcacttccaacaacaaatgttaatggacgctgccaagatttttcttgagacggctaaaaacgccgattctcctcgtcacatggaagtatttgcaactcttatggggcaaatgactacgacgaacaaagaaatactgaagcttcataaagatatgaaagaaatcacatctgaacaagttggcactaaaagtgctgctccatctagtcagatgaatatccaaaatgctacagtgttcatgggctctccaacagaattaatggaagaagtaggagatgcttacgaggctcaagaagctcgtgagaaggtgattaatggaacaaccaattaacgcattgaatgataatcacccattgaatgaaggtgacaaagttgttattctaccgcctcatttagctgaacgtaaagaagaagatggtatccattggattaaatcacaatgggacggtaaatggtacccagaaaaatttagtgactatctacgtataaacaaaatagttaaaattcctaataactcagataagcctgaattatttcaaacatacaaagataagaataataaacgtacacggtatatgggtttaccaaaccttaaaagagcaaatataaaaactcaatggacctatgaaatggtcgctgagtggaaaaaatgccgcgatgacattgtatattttgctgagacatattgtgctattacccatatcgactacggtacaattaaagtacaacttcgtgactatcaacgcgatatgcttaaaataatgtcttctaagcgtatgactgtttgtaacttgtcacgccagctaggcaaaacgactgtagtagctatttttcttgcccattttgtttgctttaacaaagataaagcagtaggtattcttgcacataaaggctcaatgtcggcggaagtattagaccgtacaaaacaagcaattgaattactccctgattttttacaaccaggtattgttgaatggaacaaagggtctattcagttagacaacggttcctcaatcggtgcttacgcttcatcacctgatgcggttcgtggtaactcgttcgctatgatttatattgatgagtgcgcgtttatcccaaacttcattgattcatggcttgctattcaacctgttatttcttcaggtcgtcgttcaaaaattattattacaaccacaccaaatggattaaatcacttttatgatatttggactgcagctgttgaaggtaaatcaggatttgaaccttatactgcaatttggaactcagttaaagaacgactatacaacgatgaagatatttttgatgatggatggcagtggtctaaacagactatttcagcctcttcattaacacagttccgtcaggaacacacggcggctttcgaagggacatcaggcacacttatttccggtatgaaattagctatattagattatattgaagttacacctgatagccatggatttcaccagttcaaaaagcctgaggaaggtcataaatatattgcgacgttagactgttctgaaggacgtggacaggattatcatgcaatgcatattattgatgttacgacagataaatgggaacaagttggtgttctacactctaatactatttcacaccttatactcccagatattgtgtttaaatatctaatggaatataacgaatgtccaatttatattgaattgaactcaacaggtgtttctgtcgctaaatcgctttatatggaccttgaatatgaaaacgttatttgcgattcaatgaatgatttaggcatgaagcaaagccgtagaactaagcctgtaggttgctctacattaaaggaccttattgaaaaagacaaactcaaaataaaccatagggctactattcaagaattcagaacgtttagtgaaaagggtgtatcttgggctgctgaagaaggttaccacgatgacttagtgatgggtcttgttattttcggatggttgtcaacgcagcagaaatttgcagactatgcggataaagatgacatgcgccttgcatcagaagtattctcaagagaattacaggatatgaatgacgactacgccccggttatatttgttgattgtgcaagtaattcggcagaatataatccatcagcacatggcctgtcaatggtataaataaaataaagcaaattaagaggaattaaaatggcacttctctctccgggcgttgagctcaaagaaactaccgtacagagtacggtagttaataactccactggtactgctgccctggctggaaaattccaatggggacctgcattccagattaaacaaatcaccgatgaagttgcgttggttgatatgtttggtactcctaacacagacaccgcagattatttcatgtctgctatgaacttccttcaatatggtaatgaccttcgtgttgtacgcgctgttgatcgtgatactgctaagaactcatctcctgtggcaggaaacattaattttactatttcttcggctggcaccaactacagagttggtgataaagttgtagttaaatattctacagatattatcgaaccagacggtgaagttacttcagttgattctgacggtaaaattttgaatatctttattccttcaggtaaaattatcgctaaagctaaagaaatcggcgaatatcctgaattaggttcaaactggactgccgaaatgtctgggtcttcttctggtctgtctgcagtaattactattgattccgttgtaatggattctggtattctgttgactgaagttgaaacttcagaagaagctattacttctctaactttccaagaatctattaaaaaatatggtgtcccgggtgtagttgctctttatccaggtgaacttggagaccagctcgaaattgaaatcgtatctaaagcagactatgacaaaggtgcttcagcccagttaaaaatttatcctgatggtggcactcgttattctactgctaaagcaatctttgggtacggtccgcagactgatgaccaatatgcaattatcgttcgtcgcaacgactcggtagtccagagcgtagttctttctactaaacgtggtgaacgagatatttatggtagcaatatcttcattgatgatttctttgctaaaggcgcaagcaattatattttcgctacggcacaaggttggccaaaaggtttctctggcgtaatcaaactgaatggtggcttatcatctaatgaaacggttgaagccggtgatttaatggaagcttgggatttgtttgctgaccgtgaatcggttaatgcacagttgtttattgctggttcttgtgctggtgaatctttagaagttgcttctacagttcagaaacatgttgtagcaattggtgattctcgtcaagattgcttggttctttgctcgcctccacgtgcagctgtagttggtattcctgttaatcgtgcagttgataatctggttgattggcgtacagcgtcaggaacttacactgataataactttaatataagttctacttatgctgctattgatggtaactataaatatcaatatgacaaatataacgatgtgaatcgttgggttccattagctgctgatatcgccggtctttgtgctcgaacagacaatatttctcagccttggatgtctccagccggttataaccgtggtcaaattcttaacgttattaagcttgcaattgaaactcgtcaagcacaaagagatcgtttgtatcaggaagctattaaccctgttactggtaccggtggtgatggatatgttctgtatggtgataaaactgccacttctgttccttcgccatttgaccgtattaacgtacgtcgtttgtttaacatggttaaaacgaacattggttcggcatccaaatatcgcctatttgaattgaacaacgcatttacccgttcttctttccgtacagagacttctcaatatctacagggtattaaagctcttggtggtgtatataactttaaagttgtttgtgatactaccaataacaccccagcagttatcgaccgtaatgaatttgtagctactttctacttacaacctgcccgctcgataaattatattacgttgaactttgtagcaacagcaactggcgctgatttcgacgaactgattggtgctgtaggtggctaataagacgcctgatgggctatttcggtagcccatataaatatactatatcgtttaaaaattaattctatgggcatccggttaatcctaagcccatattactacagaggctaatatgtttgtagatgacgtaactcgtgccttcgaatctggtgatttcgctcgccctaacctgttcgaagtagaaatctcttatcttgggcaaaactttagcttccagtgtcgtgctactgctcttcctgctgcgatcgttgaaaaggttcctgtttcttatatgaaccgtaaaattaacgtggccggtgaccgtacattcgatgattggactattacagtaatgaacgacgatgctcatagtattcgtcagaaattcgttgattggcaaggtattgcagcaggacaaggtaatgaaattaccggtggtaaacctgctgaatataaaaagtctgctatcgttcgtcaatttgctcgtgatgctaaaactgtcactaaagaagttgaaattgttggcttgtggcctactaacgttggcgaagtatctcttgactgggacagcaataacgagattgaaacgttcgaagtaactcttgctcttgattggtgggaataatctggttggggagaaatccccagcttcccgtgatgacggagaagtccatataaatataactataattcccatttggagaatacaatgaaatttaatatcttaagtttgtttgctccatgggcaaaaatggacgaacgtgattacaaagaccaagaaaaagaaaatttagaatcgatcacctcaccaaaattagacgacggcgctaaagaatacgaagtatctgaaaatgaagcacagcaaacatataatgctatgtttcagagaatgttcggtagccaagaaccagggctcaaatcaacgcgtgaattaatcgatacgtatcgaaatttgatgacgaactatgaagtggataatgcagtctctgaaatagtttccgatgctatcgtatatgaagatgatacagaagtcgtttctataaatttagacaacacaaaatttagtccaaatatcaaatcaatgatgttggatgaatttaacgaagtgttaaatcatttatctttccaacgtaaaggttcagatcattttagacgttggtatgtggattctcgaattttcttccataaaattattgaccctaaacgccctaaagaaggtattaaagagcttcgtcgtttagacccacgtcaagttcaatatgtccgtgaagttattacaaccactgaagccggtgttaaaatagtcaagggttataaagaatatttcatttatgacacatcacacgaatcttatgcttgtgatggtcgcatatatgaagctggcacaaaaataaaaatccctaaagccgcgattgtttatgcccattctggtttagttgattgttgtggtaaaaatatcattggttatttgcatcgggctattaagccggcgaaccaattaaaacttcttgaagatgccgtcgtaatttatcgtattactcgtgctcctgatcgtcgtgtatggtatgttgatacaggtaatatgccttcaagaaaagcagcagaacatatgcaacatgttatgaatacgatgaaaaaccgtattgcatatgatgctaccacaggcaagattaaaaaccaacagcatattatgtcgatgaccgaagattattggttacaacgacgtgatggtaaagcagtaacagaagttgatacattaccaggtgcagataatactggaaatatggaagatgtacgttggttccgtaatgcgctttatatggctttacgtattcctattacccgtattccaagtgaccaaggtggtatacagtttgatgctggtacttctattacacgagatgaattgtcatttggtaaatttattcgtgagctgcaacataaatttgaagagatattcctagacccgcttaaaactaatttaattcttaaaggaattattacagaagatgagtggaacgatgaaataaataatattaagataaaatttcatcgggatagttatttctcggaattaaaggatgctgagattctggagcgtcgaattaatatgcttcagatggccgaaccatttattggtaaatatatttctcacagaacagctatgaaagatattcttcagatgtctgacgaggaaattgaacaagaggctaagcaaattgaagaagagtcgaaagaggctcgtttccaagaccccgaccaagaacaagaggatttttaatggacgatttaattcaagctattaaatcaaacgacctcgttgctactcgaaagttttttgaaagtgcaatggcagaaaaaacggttcgtttgattgaagcacgcaaagcagaaatcgcttctcaatttttgattgaaggcgaagaacctgaagaagaaaagaaagctaaagcttcggaagacgacgctgatgaaggcgatgacgacgaagacgaagatgatgaggacgatgaataatgtatcttatccctgaatcttatgaattggtactcgaaaatgtcgaagcacttattcctgaagcacagggccgaatcgatgcattgtcttctgctctcgatattgacgatataaatactattatcgagaacatgcttgaaactgaaacggatttagctgttgcaatggcttccattattaatgaagaacagttaaatgagtttatcgttaaacatgtttcttctcgtggtgaagtcacccgcactaaagaccgtaaaactcgtgaacgtaacgcgttccaaacaaccggtctttctaaagcaaaacgtagacaaatcgctcgtaaggtcgttaaagctaaaaaagctaacccttcaggccaagttaaaggcttgcgtaagcgtaaaaaggctcttaaacgtcgtaaagcattaggattaagctaatgaataaacccgagttacttattgaaacttggggtcaacccggtgagattattgatggcgttccaatgttggaatctcatgatggaaaagattctggcttaaaaccagggctttatatagaaggtatttttcttcaggcagaggttgttaaccgaaataaacgtttatatcctaaacgcgttttggaaaaagcagtaagtgactatattaaagaacaagtcgcaaccaaacaagcccttggagaattaaaccatccacctcgcgcaaatgttgaccctatgcaagccgctatcattattgaagatatgtggtggaaaggaaacgatgtatatggacgcgctagaattattgaaggcgaccatggtcccggcgataaattagctgctaatatacgagctggttggattccaggtgtttcctctcgtggtcttggttctttaaccgacaccaataaagggtaccgtatcgtgaacgaaggatttaaattaaccgtcggcgtagatgccgtatggggaccttctgctccagatgcttgggttactcctaaacaaatatcagaatcagaaaattcggtggaaatcaccaaaaacagtgctgacgaagcatttaaagctctcgcagagagtttaaaagcattataaataataatgtaatctaaaccacaggacactaaaatgatcaaaagaacaattttgaaagaagctcagaatatcgagacttcagttgctcttaatagtgttttcgaatcagtagaactgtctccggacgttaaagctaatttcagcactgtattcgaagccaccgttaagcaggaagcagtcaaactggctgaatctcatatcaaagccatcgccgaaaaagccgaagaagaagttgaaaaggctaaagaagatgctgaagagaaagctgataaaaaattggctgaacaagcttctaaattcctggaccatcttgcaaaagaatggctcgcagaaaaccaaatcgcagttgataaaggcattaaagctgatttgttcgaatccatgcttggtggtctgaaagaactgtttgttgaacataacgttgttgttccagaagaatctgtagatgttgtagcagaaatggaagaagagctggccgaacataaagaagaaaccgctcgtttgttcgaagaagttaccaaacgtgatgcatatatcaattacgttcagcgtgaaaccgctattaatgaaagcgtgaaagacctgactgaatctcagaaagaaaaagttattggcctggttgaaggtatggattattctgacgcatttggtactaagttaactgctattgtagaaatggttaaaggttctactaaagaagaagccgctattaccgaaagtataaatacagttgacaatgacgctgccggtcttaattttgttgccgaagcagttgacactaccacaactcaggtagaacagaattctaatgtaagtttatatgcgaaagtcgcatctcgtttctaatttaaaggttaacacaaatgactactatcaaaactaaagctcagctcgtagacaaatggaaagaactgctggaaggtgaaggcctgccggaaatcgctaatagcaagcaggctattatcgctaaaatcttcgaaaaccaggaaaaagatttcgaagtatcccctgaatataaagacgagaaaatcgctcaggcatttggttctttcttgaccgaagctgaaattggtggtgaccacggttataatgctcagaacatcgcagcaggtcaaacctctggtgcagtaacccagattgggccggcagttatgggtatggttcgtcgtgctattcctaatctgatcgcttttgatatttgtggtgttcagcctatgaacagccctaccggtcaggtatttgctctccgtgcagtatatggtaaagaccctatcgctgctggcgctaaagaagctttccatccgatgtatgctccggatgcaatgttctctggtcagggcgctgctaagaaattcccagcgctggctgctagcacacaaactaaagtaggtgatatctatactcacttcttccaggaaactggtactgtatatctgcaagcttctgctcaagtaacaattagttcaagtgctgatgatgcagctaaattagatgcagaaattatcaaacaaatggaagctggcgcactggtagaaatcgctgaaggtatggctacttctatcgctgaacttcaggaaggcttcaatggttctaccgacaacccgtggaacgaaatgggcttccgtatcgacaaacaagttattgaagctaaatctcgtcagctgaaagcagcttactccatcgaattggcacaagacctccgtgcagtacacggtatggatgctgatgctgaactgagcggtattcttgctactgaaattatgctggaaatcaaccgtgaagttgttgactggattaactactccgctcaggttggtaaatctggtatgactaatatcgttggttctaaagctggtgtatttgacttccaagacccgattgatattcgtggtgctcgttgggccggtgaaagctttaaagctctgttgttccagattgataaagaagcagttgaaattgctcgtcaaaccggtcgtggtgaaggcaactttattatcgcttcccgtaacgtagttaacgtactggcatcagtcgatactggtatttcttacgctgcacagggtctggcttctggttttaataccgacactactaagtctgtatttgccggtgtacttggtggtaaataccgcgtatacatcgaccagtatgctaaacaggattacttcactgttggttataaaggcgctaacgaaatggatgcaggtatttactacgctccttacgttgcacttaccccactgcgtggttccgatcctaagaacttccagccggtaatgggctttaaaactcgttatggtatcggtgttaacccgtttgctgaaagttccctgcaggctccaggtgctcgcatccagtccggtatgccgtctatcctgaacagccttggtaagaacgcttacttccgccgtgtatatgtaaaaggcatctaatcttaattgattaaatcttattttgggagacttcggtctcccatttttggttttatttctgcgcaatttcgatgtaagttttcaaaatattttgccaattaggcataccttctgaacatatgccggagaaccgtctttatttttgaatgatgcaagtttatcagtggcccaataacctttagttcgagcttcagaatcaactttcatccatactttgttgaaggcattaccattaacttttgcaccatatttttgtactttcggttacagatccagcttccagaacttttacagtatctcgtaagaaacgtgctttagtcattttgtttactcctctgcagctgataagtcgatagtatcacataccaaatacgttgtaaacaatctttataaataatctatatcacataagggaaaaatgcaatgagtaaaatccaaaaattatcgcgtgaatctacaacgtctaccagcaactcaattggtcgcccaaatctcgttgctttgactcgcgctacgactaaattaatatattctgacatcgtagcaacacaaagaactaatcaacctgttgctgctttttatggtatcaaatatcttaacccagataacgaattcacatttaaaactggtgctacttatgctggcgaagctggatatgtagaccgagaaaaaattactgagctcacagaagaatcaaaagccacactaaataaaggcgattttttcaaatataataatatcgtctataaagtgttagaagatacaccatttgcagatattcaagaaagtgatctagaattagctcttcagattgcagtcgttcatttaaaggtacggttgttttcagatgcagcggtaacaagcaaatttgaaagctctggtagcgaaatttctgatgcaagattccagattaataaatggcaaacttcagtcaaatctcgtaaacttaaaaccggcctcacggttgaattagcgcaagatttggaagcgaatggatttgatgcccctaacttcttagaagatttgcttgcaactgaaatggctgatgaaattaataaagatattcttcagtctttaattactgtatcgaaacgttataaagttactggaattactgacaccggatttattgacttgagctatgcatccgctccagaagcaggtcgttcgttatatcgaatggtgtgtgaaatggtatcacacattcaaaaagagtcaacttatactgcgacgttttgtgtagcttcagctcgtgcagctgctattcttgctgcttccggttggttaaaacataaaccagaagatgataagtatctttcacaaaatgcttacgggttcttagctaatggtttaccgctttattgcgatactaacagtccattagattatgtgatcgttggcgtagtagaaaatatcggtgaaaaagaaattgttggatcaattttctatgctccgtatacagaaggtctcgacttagatgacccggaacatgttggtgcatttaaagttgtagttgatccagaaagcttgcaaccgtctattggtttattggttagatacgctttatcagcaaatccttacacagtagcaaaagacgaaaaagaagcgagaataattgatggcggggacatggataaaatggcaggacgttcagacttgtctgttttactcggtgttaaattgcctaaaattattatagatgaataaacaaaaaaagggaccttacggtcccttttttcgttatgatactaattcaatccatgcaggacgcagaacatcttgcaccattcggactaattctttcttaacaagattcggattatcagatgttgttaatacaataccttcacgagaagtttcttccagaatatcttgaacagtcaatcccatcactttgccaaaatcttttggcgttacagtcccaatcttagaaataacattattaacacgatttaatgtaacataacaagctagaacatcaagcaagtttttgtcaatttcggttaatggaacctgagttttaataggcttatcagactttttcttttcactgaatttagagttcttgcacttaatcgctacacgagtaccgtttggcagccatttagggaaacaaggcttcagaacataaccttctgcagtattatcaccaataacattagcatcaaatacacaattatttgcttctacaaggtcttctgacgcagtagcattataagcggctaaaacggaatcaaggtcatttggaatcatgataagagaatcaaatgttccacgaccaagcattggtgccattttaaaaccgaattcattacagaaatcttgcatttcgtaatcggtcaaatacgtattatcaccactttctgtattgataaggatatcgaacacataaaaatctttttcaccgtagtcaacacctttctggattccaccaccagcgaattcaccgaatacttgatatgatacggctcgagctgtgtacatgaatttctgaacggttttaatagctttatcatacttcttgagtacgatttcataaccataaaaatcttctgctggaagaatagggcctgtgcgcttggcgcatgtgacgttgtcacgttcaattattaacgagaagttggtcccatggattttctcacgtgctacccaaacaccagtagtcaaaccattagtgtagagtttttcaataaacttagagttgtagtggttttcaagactgctgtatttcttaaacataaatcaccattataaataataatatcaaaataattagcagagactctatctccgacccgatgtttaatttgaatggatagaacctagattcattataccatcaaaaaatgtaaagcatattagaacttgatttctatccaatgaccatcacgttggtcgtgattaattttgtactgaaagccgttatcacgaagccattgaccgacttgttcagttatagttaaatcgttctttgacgggtagtacgtgaattgtgtctgacctttgtcagcggctttctctgccatcgcagagaagttagtaataaaatcactcaacaaattagctttagtggccagagccctttctcttaattcctgtgcaaaactcatttcttcacctttttgttaatcaaacgtttacggtatacaactttttcttttgctttaaactttgaccgagctgtctcggctttagtccatagtaatccaacttctttaggttgtaaaccgattttttgagcaatttctacgaatgaaaatcccgcctcatgtaatgtataaacttcaacttcagctctcataatcaatcccgtattatttggtttgtgccattatatacatcaatctcacgttgtgttttgtatgctttaaaaacgaagaaaggggccgaagccccttacgattatggatatgtatagatgataccagtttccaaagcagttttatggatgatgtatccattacgtgattcttgaacatcaacttctggatagtctttcatcatcttctgaagagtgtaacgatgcaggtagtatttactatctggatcttcagttttccaatctttaccttcttcagtcattttttggatttcatccataacccaccaaccgcaccagatgtaagctgaagtacgatgtggaagaggatgaacataaggtagttcaccttctggctcaattggagtctgttcagtaataacaacttcagcggttgaactaattgtctttgaagtatagttatctttagttaatactgcttcaactttaattgtatgagtaccagctgaggaggtatcaatactgtaagtattagtagaattactttctgctacattgtctttcttccaagaatacacaatattagtatcacctggagcaccagtaacagatgctgttaaagttgcagttccgccaacagtagtattaactgatggcggagataaagaaatggtggcactattaaatgtagcattattagttactactgttgcttctgctgaaatttcttttgtaacataatttgttgcagaaacagatacggtgcatttaagagttttacttccgacctcggttggagtgaatttatacgtagcagaagttgcatccagaatattactgtcatccattgaccattggaatgatgtagtagcacctgaaggtgcaccagagacatttgcagttaaagtaataggaacaccaaagaccgtagtcggagactcaggcgtaatttttagtgttgaagaattagcctttttatttacagtcaaagaaaccgctgatgattctactgttttatcaacgtaatcagttgcagtcactgtgacagaacaagttatagacttagttccttcagatgttggtgtatattcaaaggttgattgcttttgaccatcaacagcgaccccgtcaactttccatgtataagcaatagcagcaccactaggttgattgcttacattagcagtgaatgttgttgctgttccaatttctactgccgccggagaagccggagtaacagcgacggtagaattattttctttcttattaacagtgatagttgttgacgcttcagctatttccggatctcctgcggaaagtgtattggttgcaaccactttaattttttttgttcctgccggagaagcaagagtataatccattgtagcagccgtagactcctgtgctatatcatctacagtccagacgtatgtaatagtaccatctggagtttcacctgcaggtgtagcagtgaatgtttgtgaacctccaataacccctgtaggagttaaaggagataacgtgacagtgaatgccataagttatccttattttaatgttacgaaagaagaattacgagtttcacgaattagaactgatccatcgcgattaatataataaattaagctaaataatgtttggtgagcagaagcatgcacaaaactcgttgggtgagatttccaatctggggtttcggctatccattgataaatccaccaaggaacagtaacatatcctgggcctttgcctaatttaatgagtgtaggactaaaattttcaggcagaacaaaatttacttctttatttacttctggctcaggctctttttcagattcaacaacctgagtaattgcttcttcgaatttatcatggtcgaattctttttcttgttcgacaacttctaatacttcaacttgttctgttggagaatcaaacaacagaatagcttcttctttaacttcttcgttggtgaaattaacaccgtccacatcatctgcggcagtaattaaatcagtaatagataatccatcagtttcaggtaatggttcatcagccagtgcgttaagagcttcttcgatatcaataacaatattatcgaacgattttgttttcttaacactaatgccaaattgttctgcatattcaaacagtttagctttagcttcctttttatcagaaagagcacgtaactcttcaatatagtctttatcgatcatggtatttcctcattataaatataactatatttattacatggtaatttgacatgactgacattaaagtacatttttatgattttagtcacgtgcgcattgaatgcgacgaaagtacgttttacgaacttcgtgacttttttagctttgaagctgacgggtataaatttaacccaaaatatcgctatgggcaatgggatggtagaattcgacttttagattacaatcgtttgttaccatatggacttgtaggacaaataaaaaagttctgtaacaatatgagttattctgtatggattgaccctaaaatctttgagaccgaagaccttaccagggaagattttgacgcgtggctttctaaacaagaaatttattcaggcaacgccaaaatcgaaccacattggtatcaaaaagatgccgtatatgaaggtctggttaatcgtcgtcgaattttaaaccttccgacatcagcaggtaaatcactaatccaagcacttttagctcgatattatctagagaactatgaaggtaaaattctcattatcgtccctacaacagcattgacaacccaaatggctaatgattttgttgattatcgcttgtttagtcattcgatgattaagaaaattggcggtggtgctgataaagcggacaaatctaaaaacgacgctccaattattgttggcacatggcaaacggtagttaagcagcctaaagaatggttctctcagttcggtatgatgatgaacgatgaatgccacttagcaacaggcaaaagtatttcttcaatcatctcaggattaaataattgcatgtttaaattcggtttatctggctcattaagagacggaaaagccaatgtaatgcagtacgtaggtatgttcggcgaaatcttccgtcctgttagcacgtctaaattaatggaagacggacaggtaactgagcttaagattaatagtattttccttcgttatccagacgaattcgccaccaaattaaaaggtaaaacataccaagaagaagttaaaattattaccggactaaaacgtcgtacaaagtggattgctcaactttcggtaaaattggctaagaaagacgagaacgcctttgtaatgtttaaacacgttacacacggtaaagaaatatttgaagctattaaagagcttggatacgaaaaagtttattacgtatcaggtgaagttgatactgaaacacgtaacgctcttaaagtcatggcagaaaatggtaaaggcattattattgtcgcatcatatggagtattctctaccggtatttcagtcaagaatcttcatcatgttatttttgctcatggtgttaaatcaaaaattatcgtacttcaaaccgtaggtcgtgtgcttcgtaagcacggttctaaagctgttgctacagtttgggatctcatcgatgacgcaggtgtaaaacctaaatcattaaatactaaaaagaagtatactcatcttaattacttgttaaaacacggtattgatcgtatccaacgttacgctgatgagaaatttaactatgtaatgaaaacaattaatttataagggcttcggcccttaggagataaaaatggtacttgaatttaaacaatttttatacgaagcatctattgacgaattcatgggtaaaattgctagttgtcataccttagaagggcttgaagaattggaagcttattataagaaacgtataaaagaaacggaattaaaagatacagatgatatttctgtcagggatgccttagcaggtaagcgtgccgaacttgaaggcgacgatgaggatgcggaagaagatttctaattaaaaaaaggcccgacctttttggaagggccaaaaaccataggcaaaaaggtaacactatagtaaaagttgggtttcgttcaattgctcttctgaactttctgaaaccggcaattgttgtacataattataacaaggaccaggatgtgctggacctttgtctgtttcaacaaccaatgcagaatcgattggagttttacagacaacacaaatcttatctgacatgattgtctcctctgaattatatatatctatttataaccccatcttaaagcgcatttcttgtacacgctttaaacatgcttccatttctgctaaaagtctaaatacttctttataatttgtcatatttaccccatatctctcatatgcatatcaatgcccatatctttagaataaaaatattcatcaagatatccggcaaattttcctttaatataaaggacatcttcaccacacgggtggttcgtcagaatacgaatatcctgacgtcgtagacgatacttttccattaagaatttaatttctgtttcaaattcttcatcattattaaaggcatcttcaattgaataacgcattattgccccgcttcaaattctcgcatatcttgaatatgtttaagtgcaaaactacgagacttaaccgcatcaagtgcaccactacagaactcaagtaaaattccccagtattgtaaagtagtctctattttaagcacatctttatctgcggccaggacagttttcatttcagatttctcgtatcggtccatactgaattcatcaccatcacctcgtcccgagtagtagtctaatcttgcttttagagcagttttcttctgagtctctatacgcaacatttctttacgaataaatgagtgcttacgtagccatttgctgtataacttaacattattcgccgtctcatattgcaactttgtcgtatcaatagctaagtctgcgtctaactcttcctgtaaatcttccagcttcataatattctctcttttaactaataatctcccggctgtatcggaaggacctaaaaccattatacataggttgccttgaagcattacactctattgcttgacgctaactgaagtttaatttgttcaatatcgtcagggttgtctacgaccgaaaatctaatctctactataaccgtatagtcgtcatataccggcgttacacttacagaaagtttgtcgatgcgtggctcatagttacgaacagctgcctggatattacgctcaatcgtatcggctgtaagtggtgtcatattctcgaaaagttcatcaaccaaatcgcatccaaattcagggtcgaaggggcgtgagccttttctagttgtcactatgccaagaagactatttttaatagaacgaagtcctacagaacgagcaacgtccttgttccaatccatacgcatttctgggtcgatatctgaataaagtttattgatattagacattatagtaactcaaagaattctttgaggcctcgtattgtgtgaacgtgtgacgccccacatttgggacatttaataggggttgccagataaattgatggcgacaccaaaagatttttaatattgatcatgtcatcttctgttataaggccgtaaaggtcgtttatttctgcttcagttaaatcttcaacagggatggactctccattgacaaaaacagcctcaatacatgaagcaatcattaatgcgatatttttatcatcaaataatttaggttgacggaacttaattttaataccgctgaacgaataccagggatcggcctgttcatctaattgagtgtgcaataaattcatatagacttgaaatgaatgcccacaggaacaattccaggtgtgttcttgattcacttcacctaatgaatgtgcccacagatttaccaacaataactcggcttcttgtttagtcaagtttttagcgttagagcaattagtgataatattgttcactgctgattcaatagtaccggtagcccgcgcacctatgagtcctaaatattcttttaaagtaaaggctctacaattcacttctttatcgcctaaacgtacggtaaacgtatatttgtacatgttaactcctttattgtgtatttataaataatagaaaaggagtaattatggctaatataattcgttgtaaattaccggatggtgttcatcgttttaagccgttcactgtggcggattatagagactttttactagttagaaatgatatcgaacatcgttcgccgcaagaacaaaaagaaataattgccgatctgattgatgatgattattttggcgagtaccctaaaacatggcaaccatttatattcctgcaagtttttgcaggctctataggcaaaacaaaagttcccgttattttcacttgccctaaatgctctaaagaaaaaactgcaccatttgagatatatcaaaaagaactagtcgaacctgaacttgatgttgctggtataaaaatacgtttttctttccctgaaaagttttatgacaataaagcattaatgataagtgaaaacataaaagaaatatattataatgatgaatggtacccatggaatgatttgactgaagagaaccaaatccaagtaatagaagcaatagacattgactcgctcgagaaggttattgcttctatgaatcctattaatttgacccttagattaggttgttgtgaacgtcatgttaaaacatatactgatatcttagaggtttttaaattgttagttaaccctgatgagatttttacattttatcagataaaccattcactagtaaagagtcaatacacattggattctattatgcaaatgattcctgttgaacgtggtattgctttaacattagtagaaaaggaccataaaaaatgacagtattccaacgtccaggatatcctaacttaagcgttaaattatatcaagattattcggcttggcaagaaaatagatacgttgaactcgcggcaacaataacaactttaaccatgcgagattcgctatatggaagaaatgaagggattcttcaattttatgacactaaaaacatccacactaaaatggatggtagacagatagtccaaatctctgtttcaaattcaaacacacctctccaagttagaactcgaatttatggatgtagacattattctgtgtctgtagactcaaaaggtgacaatattattgcaattgagcttggaacaatacattctatagagaaccttaaatttggacggccattcttcccagacgcaggagaatctatacgtgaaatgttaggtgtcatatacaaagaccgtacgttaattactccgccaataaacactattaatgcttatgttcctgatattccttggacaagcacatttgatgattatttggcatatgtcagagaattaggacttgctacagcgagtgataagttcgtattcgtatggcaagatattttaggcgtaaacatgattgactacgatactcttattggccaggaaggcattaagatggttgtaggcgagccaaataccgtaggtcagtatattcaagagcttgagtatccattagtatgggattttacctggatgactaaagctaaccaatttacaagagaccctattaaaaacgccacggtattcgcccattcatttttagatacatctattccggttattgttacaggtgatggtgataacgctattgttgtgtcaagatccggtggatattccgaaatgacctatcgtaatggatttgaagaagcaagtcgtcttcagacaatggctcaatatgacggatatgctaaatgcactactacaggtaattttaacataacgcctgctactaaaattatatttgttgaccaaaagaaccaattcaaatctgaattttacgtagatgaagttattcatgagttatcaaataacaactcacaaactcatctgtacatgtttaccaactcaatggtgttagaacctgttaacccagttaaggttaaaaatgaacttaaatctgattctacctctaaagaaaataattctaccacagtctaataaaaaggtaatgattcccaaattagggctcaaacattataatcttttaaaggacgttaaaggtcctgacgaaaacatgaaaatcttagctgattctatttgtaaaaatatgagtcccgcagattttgattttgcatgtctacacatattggaatttaataacaaacttaagtctgaagttgaaaaagacggattcacatataaactagatgacgtctatgtatgccaacgaacagaattccaattccaaggcaatactttttattttagacccccaggcaaatttgaacaattcgctacaatcagtgaaatgctatcaaattgcttaataaaagttaatgacgaagagaaagaaatttctttccttgagatgcctgcttttgtaatcaaatgggcagaagacctttcgacaactattgctattccaggccctaatggccctattaagggtatagcagaaattattggattgcttgaatgaaacctgaagaaatgaaatccatgcgtagaaataaggtcattgccgataataaaccacaaaaagtagctgcaacagcagctaccgattcattagaagcattgaataacatttcatcaaaactagacgatgtccaagctgcgtctgaactcacatcacaaagtgtagaagataaaggcaatggaattattgaatcaattggagacttaaagaattcgacagataatactgctgaaggcacagagcttatcgcagaagttattgaaaaacaaactgaagtcactaaaagtataaacgaagtttctagtgcaataagctctaagttagaccgattagctacattattagagcaaaaattacaaacatctaccgctattcaaaatacaggaggcacctctcttgaagtaattgagaatgcaatacctgttaaagtggttgagaatgaaacttctgatgagttgtttaaagcattccctacacctgaaaagatcgataataagccagacgaagatttcttcccaacgccggttcaagaaagtgctaattctacttccgattctaaaggcgggattagctttaaattgagcgataaaattgcaatgctcaccaaaacagttcaaaccgggtttaataaatcaatatcaatttcagacagaattgctggaatgcttttcaaatacactataacggctgctattgaagcagcaaaaatggccgcacttattcttggtattgttatcggtattgatttattgatagtccatttcaaatattggacagacaagttcacttctgcctgggatttatttgatgaaaactttactaaattctccgatgaagctaaagagtggggtaaattcttaagtgatatattcacttctattgactcgataaaacaattgtgggaagctggagactggggtggtttaaccgttgctattgtcaaaggtgtaggaacagcattaatgaacttaggtgaactaattcaattaggaatggctaaactctccgcatctatattgcgtgctataggttttggtgataccgcggacgaaatagaaggacgtgctttagaaggattccaagaaactactgggaacaaattaaagaaagaagaccaagagaaagtcgccaaatatcaaatgaagcgtgacgacggggaattaggaaccgtttctaaaggtcttgatatgttacaacgcggcaaaacattcgttactaactgggttcgtggtaatgataataaagaagagtttagtacaagcgatgagcgtgctgcggaatcggcaaaattaaaagagttacctgaagaggaacgtaaagaggcatatataaaagctaatgaaactcgggcagccttagttagatttgaggattatatcgataaaatcgatatgactaatccggaaaatgctaaaaacgttgagaagtcttatgccgatttaagtaaacttattaaagaccctgaacttaataaaactcctgttgttaaaaaggaattagatgctagatttgaaaagctaaataataaaatggctgaagccaaaaaggctcagacaacagttaagcctgaatcttcgtctaaatctccggaagcaaaacaagttcagtcaatagagaaaggacgtgcttctgaatctaaacaacagcaaccggtagcgacgattagtaatacaaataatgtcgtcaaaaagaataccgtagtccagaatatgacccctgtaacaagtacaacggctcctggaattttccatgccaccggtgttaattaaggattattatgattagtgtaaaagaaatagtagtagatgcaaaggatttaaataaagcaatcccagtctcagaaagtgctgggcaaagcactaaaaccgaaacaactactaaaacttatgttgctcaatttcctacaggaagagcagccggaaatgactccacaggagacttccaggtaacagacctttataagaatggattattatttaccgcgtacaatatgtctgcacgcgattcaggatccctaagaaatttacgtccggcatacgccgggacttcatctaatggtatcatatcagatttaactgataatgtgaaagatgcagtgactaaattctcaaatggattgcttcctgccggagctaataaatctactataaataaaactcctgttgctaatatacttttgccacgttccaaatctgacgttgatacaacttcacatcgttttaatgatatcggtgatagccttattactaaaggtggaggtactgctacgggcgttttaagtaacattgcttctactgcagtttttggtgcattagattctattactcaagggcttatggctgataataacgaacagatttatacgacttctcgtagtatgtatggcggtgctgagaaccgtactaaagtctttacatgggatttaactccacgttcaactgaagaccttatggctattataaacatttaccagtattttaactatttctcatatggtgagaccggtaaatcacaatacgcccaagagattaaaagttatttagacgaatggtaccgttcaacgtttattgagcctatgacaccagacgatgctgtaaaaaataagacattgtttgaaaagattactgcgtcattaacaaacgtattagttgtaagcaaccctacgatttggatggttaaaaactttggacacacatctaaatttgacgggttaactgatgtatttggcccatgtcaaattcaaagcgtacgttttgataaaactccaaatggacaatttaatggtcttgctgttgctcctaacttaccgtcaacatttacgttagagataacaatgcgagaaattattacattaaaccgttcttcactttatgcggggactttctaatgtactctttagaagaatttaataaccaagctataaatgcagatttccaacgaaacaatatgtttagttgtgtatttgctactacaccgtcgaccaaatcgtcttcactaatttcgtcaattggtagttttgcttataataacttagggttggattcagattggctaggattgactcaaggtgatatcaatcagggcgtaacaaccctgattacagcaggaacacagaaattaattcgaaaatcaggtgtaagtaaatatctgattggagcaatgagccaacgtacggtacaaagcttgttaggtgagttcacagtaggagcttatctgatagacttcttcaatatggcatataataatacaggtttaatgatttattctgtaaaaatgcctgagaaccgattatcttatgaaacggatttcaactataactccccgaacatccgaattaccggtcgagaaatggacccgttagtaataagctttagaatggattccgaagcatctaactttagagcaatgcaggactgggtaaactcagtccaagaccctgtaacaggtcttcgcgctttaccacaagacgtcgaagcagatattcaggttaatttacatgcgcgaaatggtttaccacataccgctgtcatgttcactggatgtattcctgttagcgtctcttctcctgagttaacgtatgatggtgataaccaaataacagtttttgacgtaacatttgcttatcgcgttatgcaatcaggtgctgtaaatagacaggctgctttagaatggctggaatcaggacttattagtagtgtttcaggaatgtttggaaataatcagaatgattctggactaggaagtgcagtatcaagactttctagattaggtgggactgctggtggtgtgtctaatataaacacattgacaggtgtggtgaattctgcgtcaagagttttaggactataagaaaaagggagacaacgtctccctttaggggtttatttacggaatgaaaggaatgctggtgctcggaatggagtatcatctttagagtatttaactaatacgaccattggtacctctgtttctaaatgacctgtcactacacctataaaaatttggtcggtgtgctcagggtcacgaaagtttttaagaggttccatagcaatatggaatgcacctgggaatactcgattcaattcgtcaatcacagcttcgttaaaaacatcatctgctggaataacattttcaactactagttcttgaccattaaagcgaagcatagatttcataacggtttcctcatgttgttgatgggatgatagtataacacatccatgtgcttgtaaactatccttggacaaatttaaacggaactgattctaaatccattaaagatgctaacaatttcaaacctttaggtgcgctagttttttctacaaatgaagagaacgataccggctcatctgattcgatttcacctgtcatagcaaccacctcacctgtttccatgagaacatcaccatcataaatgacagcttcatctaactggtctgaggacatgacttcagcttgaataaatttaaggttggattctaaacctgcaccagtgtcagatgacgcatctgtaattttatttatctgcaagagaatgcctctaggcaaaataatttcttgctcattagggtgattactcaactgtcctggataaatcacgttaactttatgagcaccatcaatagcccatccaacgttaacacggatttgttctggtgcatgcatagctgttcttacttgactaggagaaatagtaacaccttcgtcattattgtcaatgttaagctctttgcgaacgttcttcaggagcaagtccaagggcaacgttctctttaaacccaccgaaaataataggagcttgtgaagtggaaacatagtttctgaagtagaataccttatttttaaccattgcttcgtaaataggcattctgatagactgagctctatataacgtttgtccttcaggtaacggtctccatttaaaaacgccgaatcaagaccatcaatagcgcgtttaacttcatcttcatctgcaacatcgtaaaaatctggtttataacgacctaacaacatattattgatatcggtatacgcagaagaggcatattcacgaatagctcgtttttcagcaacagagtattgtttagggtcccgattcattgttatattaaaggtgcctctagccgattctcgtgcataagtatacatcacattagacaagaacgctgatttacgttgtttccaagttttttcagatacttcagctaaaacgtcgtcggccagttggaaattatcacgtctaaaatcttcaaaccattcgtctttaatagagtctgcaatctcatttgcagcttcaacaaaagcagctaatgctttaacagatgttgttttttcagttttaattttcttagcaaacttttctaaagttggcttaataacaccaccataagaaacttcatcagcaaatttaaaggattcatcaatacgattataaatcttattttcgatatcagcaactaaagtgccttttgctgtggacgatgcttgggctagtactatttcatatgcttcaggaagtaattcggctgtagccgggccactaacttctttagcagaattttcgtatttctggaataactcaccttcttggcggtccgcttctaaagattgacttgctgcaatagcacgacgagaaattttagtacgagcaataacaggcttatctttacgtttttcttctacagcagcaatagaaccagcgatagccgtttctttggtgaccttttcgccagtctttttactcacataaacttcgccaacatcagaatctactttcgtgtacaactctgtgttaatgttagggatgcctttaatatcttcaatgttggcatttttacgaaccatcatcacataggtgtgtttacctgtgaattgatacattgccgacaatactttaaaacgaccaccggttttagtagaaactaaacgagcaagaagagtttgaagctgctgtccacgtcctttcaatttcttggtagggaatcggaacagaactgcatccatacgaagagctttaacctgttcatatactgtattgaaaatggtgttgattgcatcaataggagcaggaccaaggccatttttcaattcagcgagattacccttttcagatagactcataataacaacatgagcgtatttgtcgccaagtttaacttgttttacagcatcaccttcggaaaggtaagagaataagcgaactacgatgtttgtatcgatatcaccaattttccagacttgtggaactttagctttagggttcaaattgacgacaggaagactgccttcagattcaaacacttcatttaattgttcagacatagtgttttccttttagtaataatttatatttatgccaaaaagagcccgaaggctcttaatccacaatctggagcaaagtacgataaacttcaaaattagggcctttttcgtacttatcaaaattgtccataaaaatatgataggaatcgttattaggaaaatctaatacaatttgggaacaagaggtggaaacatcaccaccatctttattagcgacaactactgtttctaaataagctttcattatacacccgtctggtcccaggacccaaatacgtcttcaaacgaatccgcttctgttttatcaaaacggaaccctttaataattggaaggaaaatacctacagtaccttcacggcctttagaatgaacccaaccattacattcacaatcagcgatacgtccaatcaatttaccttcacgagcttcggacattaatcgttcacggtccaaatcatgacgctcgtctaaaggaataagaacctttacaccgtcaactgttttatgagttgtatctttaaaacctgaaccacaatcggttgtaatacgacgacaacgtgatacgagttcgacaccacccaatttgttagggtctttagagtgttcatagtatcctacaacttctaaagctatatcaataacttctttaaatttaattaggttcttagagcgtttgttttcccaatatgaatcacggtttttaaggataataccttcaagaccttggtcaacatattttttataaaccactttagcttcgtcaagattacgaactaactgattttcaattggctcaattcgtttaaagccttcagccatattttcaagagcagcaaaacgaacatcgtatttctgacctttaattttgccatcagaatagacttcatctaaaggaacatagtcccaggcttgaagaaccataccttcagcttctttaggagaaatagtcccttgaagagatttatttgctaaaccgtttgaagtgctacggtctgcaacttgtacttcttcggattcttcattatcaccaaataagaacgacaggtcatttcctgagctcacagcctttttaatatcaaatgaatgataaactaattcgccgtcgattaaaaccccattagggtgtctttcacgagcttctttagtcatttccattagttcatctgctaatagggtaagaccatggtattcattaccagcacgagaaaagaattgaacaccatcatcgcgaacttcagcgaaacaacgagcaccatctgcttttaattgagcaaatgcaggccatttaatatttttagtaatcaatttctcatcatatgcagatgctaacatctgtggttgcaattgaataagtcctggccacaccttattcgcgatagacactgaagcacctacttcaaggtcgcgcatcattacacgacgaaggacttctacatcatcaggtttaccgtcagcgatataacccatgagctctttaattgcagcattaccagtgagtttacgagtggctaatgtgaactcaataaaatccaacatgtcatctaattcaagaagaccatatgcctgagacctttcacctggcccaggccatttcttaatataatactgaatgccacgtgcatatgttaaacgatacacgcgttcaagtaatttgttgtccttatttttcttaaggatttcctgttttgttttagtagaaccgatcgcagctatttggtttaaaatatctaaaatcatttgatatcctcgattttggttacggttctattataagccacttcatctagaagcgatttcagcgttttctgataagtggtaatccgtttaccgagtccttcaacataatattctgaaatgtagatgaacccttgttcaacacactctttaaatatttctgcgtcttttactgaacgaaacaatggccggtctcgaaagaacatgttaacgtgaccgtagtcacgcgttgtgtttttgccatctgtaatatcatgaactacaaacataattaacccttaacaatttatagaccaagtccatttagacgaatctaaaggaaagttttgaatcgtccaccacggctgcatatcggttggtcctggagttcgccaggtgtacggatttgacggagcgccaatttgattaggccatgcgcctggacttgttgcaccagattctttaagcaaatccgccaatcgttttaaaaggtcttcacgatctgaatctgaattatgctcgggcggaaccaaacgagattcaatatcatcccacgtgtgtacacgttgtgcagtgcgaggaatatcatcacgttcaccacgagccaaccaataaatcggtacattaagaatttctgccgcatggtcacagtgatgagctaaatcgtcaacgtaacaaatcacgttatattttgttttagctagttcgaataattgttcctttgaagaatcatgaccacacatcattacttcagagaaagcgcctgggaacaaagcattcaaattaaattgtctattcaatcgagcatcaattgaatcacctagcgccgtcacggctacaaaattatagtcttcttttagtttattgataactcgaagagcatccgaataaggcgctaagtaacgaataaaatcagagcgattatatttttctattaattgtttaccaaggttatcgtcggtattgaacagtttaccaggagaaataaatttttcgtcctgaatcatttttaaaatatgttctaatggaagattatatttttgggcaaaataaggaagaccagattgccagcttaaacatacaccatcaatatcagtcaaaatagtaggcttcataaagagtctcttaataggtttaacacatcaataaattcagcttcaagttagtattgtatcatcttttgttagaccactagccatgctgtgcttcaaaatttttcctttagaggcttgtaaggcatcacgaaaccccttgttttggatcgcggcttcaaaatatgcatttgtgtataattctttccacgcttcggagtatcttgaaaatggaactcctaaccagaagagagtcccacggtcctgagctcttgcataagaccttcctgcttgctgtgcagccaatccagacaacccaaatatactatgttgttgttcaacatttttcaccttacatccttggagaaatccttcaagacctccgaattgaataccatccataacaaaaggccattgagcaaagttacttaatgcacatgacggccacttgaaattacttctaatctctaactcaggcatctttaacacttataatttcaacatcagcccaatgaccataaccaggtatacggtcttcgatagataaatttccgtcatttttaggcattttaattgacgtaacgtatggttctaaacgattttctgcgtgtggagaaacatctgtcacacgataagtaacttcaatcgtttccataccaaacaatttctggattaattttttaagcattttattagaacctcatctgaaagccatgtgatttaacattaccgccgccaatatcagaaatgttaatttcacttgcaatcgaaggatcgatgtcaatttcacgattaagtttagtgatagccaaagtatcatgcccatttactgtacgaaactccaaaggacatactacgttgacatagtgtttaattgactcgctagtaggttgcaaatggaccggaaggtttttaggtgctttagagaaaacaacttcacaaaagtttttgcgggtatcaaaataagtggtcataaacataatattttcctcaattgggaagccgaagctcccagttaaattagatatcgaattcattaagaactacatcaaagattgcttcgagatgttcaggtttagctcggttactcaggatatgacgaatccaagttttaaccaaaagtttacgattaacaccgttccagcaaggatgagtacctaaatcacgctgacggaaatcatcatctaatgcaattttgaagttggaaccttccatcgtgattgaaaccgtgatgccattttcaaatcgcatataaacgtaattaggagtcatgcactgttcgatttcacaaactgtaccgtttttgtgtttccataagcaaataacttcagaagaaccagcgataccgttagaaacatatttacgttcgaagttgatgtagttcattttattctccagatgtttaagttgtttgttggtacaggtctataataacatatcctgtaccaaagtaaacattttttatttgatttttgtccacttagctgaatcaataacaccttttgctttaatcttctcgattaatgactctgcgcgatttctggcattttcgtaccatacaacgtcttcagagtaaccagtttcttcatcttcgtaagttttagaacgaatacagccataaactgtagaattcagacggtaaatttcaccagtgaaaaagttttcgatttcgatatgataacaaaaatcgtctgaagggccatcaggagttgtacaataaaccacatcaccttgaactgaacgaaccatccactgtaactcgttaacaacttgagatttatatccatcatggtcacggcatttaattgtagcatttaaattgatagtgttcattttattctccggttgttttattgattaggtggtacaagtctatagaaacacatcctacaggagagtaaacatctttttaaactttttctgccctaaacgcacaaaagggagaccgaagtctccctaaaattatgcaacaacctttccaaaacgagaagcatcatctcgaagaactgcacgtgctctgcgcatgatcttctcaacggtttgattaatacgagagttcgacccacgcttgtatccagcgcgtttagaggtaccatcaactttcttttcaactgctttctttgctttagcttgttttgccattataaattctctttaaatgaaaatgcaggacttattggcgttgcctgcgcaagccctcaacgggaacataggttttggatatttaacgacaggataaccataaacctcgtcatcataccaaccacgacttagacagataacctttttctgacgcgtgatagtacaaaatacattcaagaggtacaccgtaaaactgccggggtcttaaaactataatgattcgcaaatcattaatcagacagttcgacggctcctcgatttacttacttcagggtaataacaaaatgacgtactgctttacgagccgcagaagccagaggcttagcaaatttcagttcatctttagcttccagttcagcagccagagtagcctgagcaggattcagatgtttgaaataacgcaggatttccagtgcttcggcttcaacatcaatagatgcgccgtaattgtcatggccgttattccatgcatggcgttgcagttcaagagcgtgttgtaattgtttaatcattttaaattctcaattcgagataatatttagtagccacgttcttctgaatttcaccttctttcgacaagtctctcagttgtaggctaccgcttagaagagtgttctcttcatatagttatttatatcacttataaagacacggaatagctttatagtggcatgttacgaatttctgtttaatttctttaggttgtttaagtcccaaagccacaaatggatgtggaacatttcgaatttgtccaaccggtagtggagtcaaatcaccgacttcaacaaaaccttcaggaacatcaggacctacagaatgaactacacatagttcaggaacttcaccttgaacacgtttaccaatcacaagtcctgattcagtaacttcttcatcacctgcttgagcgggttcagaaaccagaatgacatattcaccaacagcacgaattgggagttgtacttcagacatcttatttccttgttgtttgacgatagattaataataccatactattcgtaaagcatattacataagaagcaaacgttcgaccggagtaccatcaaccgaaattactttatcaaggcggaaagaacgccactgacctaacttggtatcgaatgctcgaactgattcacgaggttcagaacgaacttctgttgccggattgttattttcatatttgacttcaagttcatcgcgcgaggcaaacatcgtacgaatatcaccgttagccttttcaaatacaacacaatgaacgcctacagacagaatagttttaatacgttcacgaagaaccatagtttcttgttcagttaaaatcatattattcaccacaaaagtttcggatttgttcccaattcagagaacgaagattattaccgagaagtactgaattacttcaataccagcttggttttagaatgtctgcccaattttcaggagatcggttgtataattctgcgtatacaacctttttaatacctgactgcgtaatagctttagtgcaatcaggacacggagaaagcgtagtatataacgtagcgccttcaatagaattacctttacgagctgcaaacaaaattgcattcaattccgcatggatttcgttattagcagaccatgcactatgagcggcccgatgttctttagccaaaacaaaattatctgcccgtccaaatgctgtagtgccttctttatgtccagcaacgatggccgggcttgatttattcttcaaccaaccattttcggatgcatgttcgcaacagttaacgccacctgcgggtgaaccattatatccagtagagataatgcgtccatctttttcaatgaccgcaccaactttccatgaacaacattttgattcttgagaaatcaaataagcaatttgaagatatgtgctagctttcattatagtgttccgtatacgcgagttgcttcaactaaaccgtcactgcctaatttaaggctagtaatctggtcaccatctttaggattaacgattatgagaaaagaacgtggagattcttgaataactcgtaatgttgcatcttggaaacgttcagacaccttattgatgagtgcttgagcaaattcttgtactttaatctgaaattcgtgtactgtaattggggtttcacttagcctttcgatttccctcattgtgttggtagagttatagtatcacaactccaccatgttgtaaaccattaaattgctttgcattcaattttttgtgtaccgaaattgatatcacattggataactaaatcaccgtcaagatcaaataccactatgacgtgtgcagacccagggagaagagtaatagcaatagaatctacttggtctgggagcaaagcattgagtacatgagttagttgagcatgaactctgagttcggctgcattatcaagcacttcaaacatattattagcaataatctgactgaagactacctttacaatttcagaataagttgggaacataattacctcagtgtacagtatttactttaactcgaacaacaaatcgctcggtcggttcacctacaggaacaaactctacatgatattcgcctttgtaacgagtattcagatcattacgaattcctgcgagtttgttgattaatgtaggactcatattaagtcccactagtttacgaagcattttgtatgcttcatcttcgatttcatgatgtttatcgtacatagttttcatttaaccattcaattgcctggtcgacgttatcaaatataccgccgtccaaacgttcttcatgctcatagtccagcacatcaataccgaactgtccatttactaaaggccaggctacaaacaaatattctttatgctgttcgatggcctcaatcacttcatataatcgtttcattaaaaatcaccatggttaacttgccaacattctaaaccaatacgacgccacatttccacaacctggttacggtcatcaacggctaatttcacatcataataaggagcaatacagttccaaaagagttcttccttaacaacatcgtccttacgagtgtcaccttgattacgttgaatatgcatttcccatggaatagaaaacgaatccatccattttttagttgcttcgtaataacacattgaatcttctttagttccagattcacgaccgcttacagtaataattgtatacccggcctgatgaagcatcttaacatattcgacaaccatagggttcggggcgtctgtggatagtttatctaactcatacggaccgcgagcaacatgtagagctaaagtcccgtcaaggtcgaagataaccgctttaggtttacctggagttcctttataaactggaagacctttgtattcacgcatacgggaatacatcgaacgtggaacatcgataggaacggtctttgtgccgcgcttggcattacgtttaaccaattcggtccatggaacatcgaacacttgatatacaacttcatgaccccactggttagcatatttttcccagccaagacgacgttcaggatttaaattggtgtcagaaataataacacccttagttccatcttgacagagaatcatatgtgccgcatcgtgttgcatataagtaacgatactttctttctttttagtatatttgtactcgtcacgttcttcgtggcccatgatggattgacgataatcgtcgcggttgatattaaagaacccaggattcttagcaataaattcacgagcccaagtgcttttaccagaccccggacaacctacagtcaaaataatctttttcacagttttactacctcttcagcaaattcaaattgtccaccaagaattttagcaatttcacgccctagttcagcacctttcttgcaatcttgcatagtccaagaatcaccattctgtgatttacgaagagcccgtgtattgatatctgctacaagcgtatggattaacttatcaattttggcttggtccattattttattcctaagaaagtttcaagaatacgaatgttatgctcgcgtcggtctttattaatttcagcaacgtttttattaattgacgtacttctaacgtttgaagaaataaatttaatcatatgacttttgagttgttgcaaatccaaacctttttctttagcagctttacgaagagctttacctgcttcatctagggcctttgctgcatctttatcataattgacaagtgacattccacggcagatatcaatatactcatccgaccatttgatgtaattttctagtaatattttcatttagatttcctcaattatccataggagcattatactctgctcccgagagtttgtaaactattttactaaagattcgatatactcatgaagagctttagtcgctactgcccacttgttctgatattcatttttcagattagcacgagactgaactaacaagcggtcattagtcggaggcaaagattctaatcgttgaatctgacggccataaatcatagccgccatttcagattcatagataagccctttaatgtattcatgctgttctttagtcattggcatttttcctcttttaaaccactacgataataacataacatagtcttctggtcatgtacatatctttttacgtcgtttaaccagatacgaaattcttgagagtcttcaaatggcattccaacccatggattaccatcaataacctttacttgccatttctggttatattcaacaatagattcaggccattgcggatgtaaagtttctttagggcttaagggcacatcctgggcacatccagccaaaatgccaatagataatacaactgcggttaatttaatcattctgagagcttcctgaggtcttctgcaaaggaatcgaaggacctgttgatttgtttttcgaccaatcctggtttacttgccaccacgttcttcttcttcgaatccttacggagcttttcattttcggccttaagttggtcaactaaaacacggttcttataagtcatttcttcgattgactgatattgaaccttgaagtcgtctaatactttagcattgtttttagcggtctctttgacagaagctaattcagtattcaacgaatcaactttgttgtttaagacaactattgttaccgtagaaactagagcaaaagctgctactatagcataaatcggatttactttaagcatgttttaataatctcaatgatttcatctcgggataatccattgataagaacggttttcaaaccatcacactggattttgtacgattcaaacaatacacacaactcttctgctgtatgatacgggcttgaaattccgaggcggttgaatttgtcggtaagagggtcgcaaatgatgtagaattttatacctgcgatatgtacgtttggttgactaatattaatgaacacattagcgtcgtatttagtcaaattattttgaagaaattctaccatggcattaactgcttccggcatcgcttcgcgtttctcttcagcgtatcgggtggaatactctttttgttttactttctttttaagatttttggccagtgtaacacggaggtcagtaagataaccaactggacgtcctttcttaaagactcggattccgtcagttgtgtctccaaaagcggttacgaccatatcgttagtaatcaattgcatattcataattttctcctcgtgttgttgataaaagccatagtaacaccttccttggtgtttgtaaaccattaatatccttcagggatgaaatttttatgatttttaataaagacagattctagagcagtcatcatttgctcttttgaaccaccttggtaaagattcataatgatgccaaatagccaaggcgactgtgcgcccttacaaatggcctgggcttctatagcatatgttttacgatcttttcctttgtgtttgtcgtatgcgtctaggcagatataaaatgatcggtctaagaaatcgagataggccttttcgaagagctcaacctttttaaatgaaaactcgtcatccgcatacattgctttaaggtcatctgaagcaccgttcataatagcaagaaacaacttttccgggctagagattgagtcccgagttgtatgaagagcaacgtaccagtcggtcttcaatttgaaatgagaaccgtctttcattacggctacatatccttcgatatttgtagaagacttaacacctgggacccagtcaccttccggtgcttcaaatctgtctacaagatatttacgaaaaacagggtctaaataaatgtcgtcatactcgatatatttgccggtattgttatctcgaatgttcaaaagaatcaatcgtttttctggatatgttagaacaattttatttgatggggcaacgtattcaaagttcgcagtaaaaccgtcattacaaagttctaataaacgatctgctaagtctttgtggttaatatctagtaaaatacttgtagcggaagcggcttgatcggatttgatagaccctttagatttgaaacgaaccatattgccgtcaaggtatgtcgagactaatgaaccgtcttctttagtcatcagatattttacatcgttaaggtcaattgacaatgtaaacgggttctcatttagattaaagaatttttccattggacgagaagcaatacgtagcggagtttcaccatccatttcgaacataataccacgacactctaacgcatcaggcagtaaccaatctgaatatgaagcaaagttatatgagaaaattcgatactttttaccgattggacttacgtcgtccgagtagaaaaatttacggtcggatgatgatttacacagagataacagattataataaagcttttccattttgtatcctcagttagttttttttaaattgtaccacaatccttgtggtatgtaaactactttttcttatgttggatattccaaggcgggttgaactttttgataaaaagtggttcttcaaggtccattgttgcgatggtcattgaaccaagttcgttggtgactgaaaggtcaaaacattggcgggcccagaattcaacctttttgccttgcattaaggcatccaaaatcataagtgattttcttgaatctgaagtctggtcttttcgatttatggctgttcgataatagttaatgcgtttctttaaattcttggttttaccaatatacacaagttcgtcatctatagcaatagcatatataacatttttcttattaggggcatcaatggttttaattgttgcatcttctaatagctccaattctatatatttaataaaggaatattcggcggcaatatctttcataataaagtgggaccgaagtcccgtccttagaaatattttttgtatgaattgattacattttggtctacatcattatcaatttgtgcgacaagataagaactgatttcaacttcctgaggagctgcttgaactaaatcagagttcagatattcacgaatccaaggatacggatgcttggtcggagcatcagtaattggacatggcaaaccgcactgtttcatacgagacacagtcaagtaatcaacaaaagcacacatactctgtgtattgatacctggacatgtaccgtctttaaagaggtgtgcagcccattccttgtacttgactattaacttccataaaaatgtcaactgcttcttgttcacattctttagcaatttgaacccactcatcgccatcagtaccagattgaagttgacggataatgtactgagtaccctgagatggagttgttcgtcacgagcaatgaacttcataatctttgcattaccttccataatttccatatttttatggaagttgaaagtacatgcaaatgatacgtaaaaacgaatagcttctaaggcgttgataacatgcaaacagagataaagagacttcattaaatcgcgcttggcgttaaacattatttcttcgtacatctcaatatcattctgctggcatgagcctattgaacactcataaacttccttagcattttcccaattacgagtcttgactagaacatcgtcataatatttacctattgattcagctcgtttcatgattgcttcgtctaatacaatctcatcaaatactttggatggatcggtataaagatttcgcataatatgagtatatgaacgagagtgaatagtttcactgaatgtccatgttgcaacccacgtatctaatgaagggtcggaaatcagtgccataagtaccgcagatggggccctgccttggatagaatccaataatgattgatacttaagattgtttgtacagatgtcctgttggaactgaggaagcttattgaactgtgcagagtccaacatcaagtttacctcttcggggcgccagaaaaatgacaggatttctataagttcttcaaaaactttatgacgctgaatatcataccgtgcaagaccaagaccagaaccaaagaacatcggttcgttcaaaacatcgacttgttgtgtattaaaaactgtactcattatattttctcacttagttattaactcatccatgagtaaattataatcaaaagtcttaaagcttacaagcagagcaatcttcagctttaggtgtttctaattcatagtcatctgtacctgacccatcacgagtgttatgatagtagagattttttccgccaaagtaccagaagtaaagcagatcgtcaagcattaccgacattggcactttacctttctcaaatacagcagggtcataataagtattagcagaagcagattggcacacccatttcaacatgatagcaacttgggtcaaataaggtttattacctttcttagcaagtttccacgcgtagtcgtaaagactcatgttatgttcgatattaggaacaacctgtcggaagttgccttctttagattctttaatacttacaggtccacgaggtggttctataccatttgtgctatttgagacttgactgcttgattcacatggcatgagagcactaagtgtactgttacgaattccatgttcttttgagttcagctcgaagttcttccagtcacagacgtagttcggggctgcgatttggtcaatctttttattgtaccagtcgataggtaattcgcctctagaccatttagtgtctgaataatactcacaaggtcctttttctttggcgagtttgattgaagctttgataaggccatattgcaatctctcgaacaattcatgagtcaaatagttagcgtcttcatatgaagcaaagttagaagctaaccatgcagcatagttcgtcacaccgacaccgagatttcgacgctttttagcttttaaagcttctggaaccggataatcttgatagtctaacaggttatcaagtgcacgtacttgtacttcagcaagttcattaattttatcttggtcttgccaatcaaatttatctaatacaaaagcagataacgtgcataaaccaatttcagcatcaggaccattcacatcattagttggaatagcgatttcacaacataagttactctgacgaattggagctttttcacgaataaacggagtgtagttattcgtgttatcaacaaactgtggataaattcgagcagtaccagaacgttcagtcatgaacaattcaaagagttctagtgctttgattcttttctttctgattgttgggtctttttcagctttctcataaagctcacggaatttatcttgatcttcaaagaatgagtaatatagttcgcctgacatttcgtgagggctaaataaagtaatataatcatttttaccaaggcgttccatcatgaggtcattaatctgaattccgtagtccatatgtcgaatacggttttcatccacgcctttgttatttttcagaactaataggttctctacttctaagtgccacattggataatacgctgtagcagcaccaccacgaataccaccttgagaacaagattttactgcagtttggaaatgtttccagaatggaataacacccgtatgtcgaacttcacccataccgatcttagaaccttctgcacgaagcataccaacgttgataccgataccagctcgtttagaaatatattcaataattgatgctgaagttttgttaatagattttaacgaatcaccggcttcaataactacacaactagagaactggcgagttggagtacgagcacctgccataattggggttggcaatgaaacttgatgagtagaaacggcatcataaaaacgaataatatgtttcaaacggtcatgagtttcgtcttggtgtaaggccatgccaatagccatgatagcaaactggggagtttcataaatcttaccagttgttttatctttaaccaggtatttttctttaagctgcatagcaccagcataagtcagatcaaaatctcgctcatgtttaatccgagaatcaagataaatgatttcttctgcagaatatctagacaacaactcaggatcatatttgccttcattaacacaataagaaatatggtcgataaaagcaggcggttcaaactgcccatatacatctttacgaagtgcaaacattagccctttggcggcgacatactgataatcaggttcttcgacagaaatcgagttagctgcaactttaatacaaatcttctggatatctttggtgctcatcccgtcgacaagatgggtcttaatttcttcgtacaattcatatgggtcgatttgtgttccttcacattgccaagttaagacttgaataattttctgtgcatcaaaattttgggatacaccactgctcttagttacttgcatatattcctcagtataggttgatagacattactccaaacgggatagtatttatcccgttaatttattatacacttttaaactgaagcgttaattattcttagcaataatttctttgtattctttaggtgtcaagactgtgatatcgaaataaaccaatggttctttttccataccgtaaccaccacaaaattcacgatattcataaattcgttcatgtgaataacaaatgaatcgttcacctttaactgtgatttcactattcggtgaagggatatctagttcggtaggatttttcatttcaaaaattgtggtgccatatgaattaataaaacgtaaaatcatttataccgccattttagctttgatagttggatgagattcgtaatttttaagaacgaaatcagaatgtgtcatcgttccagtaacccagtccatttggatttttgtaggccaattctcaaaattactaggccaattaatttcaagagaacacaactctttaggttcacgacgaagaacttctttgcattgttctacatgattgctgtagatatgcgtgttgccgcctgagaacactaaatcacccgggataaggttacacatcttcgctacaatatgcgtcaaggcagcgtacgaggcgatgttgaacggcaggcccaagaaaacatctacactgcgttgataccattgtaaatcaagatgtccattacgcacattaaattgatagaacatatgacaaggaggaagagccatttggtcaatttcggcagggttccatgcagaaactatttgtcgacgatcattaggaagagctttaatacggtcgatagttttgaccaattggtctacaccaccaaaatcacgccattgcttaccataaataggaccaagttcgccgctatgatatccaaggtcttttgcctgattttcatagttgtcgtcccaaatagttttaccttcaattagactaccatgagtacgaatacgcaaatcattaacattggtagaaccagacatgaaccacagtagttcggcaatacaagctttccatgcaagcttcttggttgttactgcagggaatcctttagtcaggtcccatcgcaatttagttccgaacagggcaatagtgcctgtgcctgtacggtcgtctgtttcgtagccattttctaggatatcattaatcaggtattggtattgtttcatttatacacgctctcagtaatttcggtgagttcatcgattctgtagtaatgagattctaccatagaacgttgaagcataatatcttggacgaaatctttatcaagttgaacatcggaattaacacgacatttcttaatgattttagtcatcacgatttcatcggcataaggcagtgcttgttttaataatgcaggaccaccaataaccgagacatcaacatgttcagtagaaagtttaaacggtacgtcggttgaagggctaaacaggttaatttcaccacccattaccaaggtaataaattctgcttgggtgatatagaaccgtgcaagttcatcagttttagtcctaggcagttttctggccatatcagtgacaaccatatgagtacgatctggtagtagacgaggtaatgatgcaaaagtcttagcacccataaccattacagtgtttttagtgcgagcaacaaagttactcatatcttgtttgatatgcttccatggaagtccatcacctaatccaaaagcatattccagtttatcatcaactgttttagacggtgcgcatgcgaatactaatttaagcattttttatttcctcagatttttcttaataactttccaatcagctttgaacatttcaacgtcggagtggtgaatccagaatcctgcgctttcaccgtcttcgtagagtggacatccatcacattcttcgttccaacccatttcacgtaaagcttcttcagcttgttcaaggagttcagcgtctttaccgacgatgttgaagtaccatttacctctaacttctgaatctttgatgctctggcgttgcaatctcattttattctcctcttcacttttatttgatagggctactataaaatagccctatcttgttataaactactttttaaaagttttttgcaaaagtttgatgatttcgtcgacgttggtttcatctacgatacaatggatttttgttacacctaaagttataccttcgttagtaggttgaggctttactaaatctacctcagtaaagtatttgaactcatcataataaatctcaaaataagtttcaatttcaccaccggcagaacatacagtaccatcttccatagttacacttactacgtttgacgtatcgctatcataatcaggttccattccgtttacaacaaaactaggcccgtggagttcaatcaattttaacatcttagcgttactgtgtggtgcttcttgaacaaagtcgtctttaaataaagggttaatgatataagattttccaatttccattttgatttcctcatttgttgatgtgttgtaataaagattctgcaaacgtctcatatgattccaggtgttcttctttaatgcgaactgcatgattatcacccgaagaatagaacatctgtacgataagagcttcgtaatcagacgaaatacatgctacgttttccggcttcaggcattcattgtatgtcgcaactgggtcagtgaaagctgcaacgtttttgctaccgcagtaatccatacttctttgaataataaaaatcattttattttcctctcatttgttgataagtctatagtatcatgtttaaaggaaaagtaaacaactttttttggcaatttacagatactcaaaagggagaccgaagtctccctaatttattatagaccagctaacaggtcatcgaggtcgccatcgtcagaagacgaggaactcatgaagtcatcttcagtttttgcagaactaaaggcttccatgtctttatcaaaatcgtcgaggtcagaagcaactttatctgcaacagaagctgctgcggctgctgcaccacccagagcggcagtaccaagaacttgattaaatttagtattcaattcttcaaacgatttgaacttatctttagaagtcatttcagaaaggtcaaccatttgttcgaacaattctttctggaaagattcatcatcaatgtttggaatcgcagattgattcaggaatttagattcgtcatagttactgaaaccagaaacctgtttaactttcagcacaaagttagcaccttcccatggacaagttacatcaacaggagtttcacccatttcagtatcaactgcaatcattgcattgattttgtcccaaatctttttaccaaaacggtatttgaataccttaccttcattatctggagcttgtgggtctttaacaaccagaatattagcccaataagaagttttacgtttcagttgagaatattcagttttgttggtattgtacaggtcatttttactaatgtactgacatacaggacaagagtcataatcgccgtgtgtagatgaacaggtttcaatataccatttgccatttttcttgaacccgtggttaacaagaattgcaaacggaagtgcgtcatctgtttttgccggcaggaaacgaattaccgcttgaccattaccggatgcatcgagtttcagcttccattcacctttatcttctgaagagaaacctttgttaccattcagtttagccatctgagctgcgaggtctgcggtacttttacgtttaaacattatatttacctttatttagattatttaatttatttacagttggttgctacgacacttatacctcgtagctggtatgatttatttataaagtaattttaacacagataaaataaagcttaatacttacatgattttattgtttctatgaacaatttcttagcagcatttacatcgatttgaagtatttttcgatatgcctttaatttggtagaataattttgccagactaaattgtcagtaagttcgtcatgcttatctataatattcaagaatgaatccaacaacaagaaggtttcaaacgaaattatattgctttgtagcaatttaaatatgtagctcgactgaactttattattataatcaaatatctcttgaagcgcactaacttccactttcttactgaaatagtagatgttacgtacatcttcagcaaacgtctccttggcttgtttgagacgtccaatatattccctatagaaaactaatgcatcagcgtctgatatctcaccaatccatgcatcttggttagcaactaagttactgatgaatatcaaagtgagttcctttaacttatatttctctgctagtttctcaaagaaatatttatctcggcgtttttgatatgcattatccgaaacacgcatgcaccagttatatttgattacgtcataccgaccattaaaatgttgtttgcacatcaagtatagtttgtataccgattttccattaatataacgttctccgtcgggaggcatgcgtattttaatcataataagaaatctaacgtattagttttttcaccacgagcaactgatgggcgaagcatgttttcgtcaattgcttcgcttgtaattttttcaacaattcctgtaggaataaatttagcaaattgtgtttctggaatagaattttcttccaagaaagcagttgttgcttctaaataagacataccaaattgttcaaccatggattcgataatgaatccgttttcttgacggtcaagcaatttagcgatatcatctttatcatgttttactgctaattcttgttcagataaaccggtctcatcaaccggtttaatatcacttagtgaaaactgtgtcataaagctcgactacctcttcgttttcagcttcaaattggtcacgagcatctttatgataaagagctaacaaacgattaaacatttttccatcaacgccaagctcttctttagcacgagtacgaatgtctttaatcagttcattataaccagaaattttaagtttgttatcggaagcttccttgactagtttagccagttcttcaccatgcacatcttgattaaattcaactgcttctttcttagccatgtttacctcagaattcattaattacacttgttaatttagaaagaccggattttacaagtatgaataaatcttgcctttaggttgtggttgatatgagttataatactctataatggttgaagcaatattatcagggatataatcaaaatcaatgagaaccaaattttcttggtaccgtttatattcttctgcacttaataatacttcagcttgagaacgatcattggcaagtgcttcaatgatcgttgttttcatgcttggagttcgttcgccttcgactcgagtaaaccagaaatcaccacgaactcgaacagacgcaacaccatctttacggtcgcctttaagaattttagtcatgcaatcaatttcggcagaaccattcttaattttaacccattttttctgcggtggcgaccactgtttaacgttagggtatttgtgtaattgtgtaaagtcaccatctgatgcaacaatacacaccttatgaccagctaatgacaaatatttagttaatacgccgatatggtcatccgcttcgtatttgtcaatatccattacaacgtatggcatatatttcttaatctcatcaacgacttgatgaagtgcagtaaaatatccttcccaatcccactttgaagcttcacgatcagttttacgatttttcttgtagtagtaagcaaagtcgcgtcgccaatacccagaagtagcgttatccatgcacaatacaaattttgtataaccttgcttacggaacatcactacgtttttacgaattgaattcaagactacatgacgaaccatcggaacggtaattttatcaccatcttcaaagttgtttaatgcagctgccaatgcaatgttactaaagtctgcaagcgcaataccttctttgtaatcttcatccaacatcatttctaaatccatatgaacctcttgttcagttagtcaacttagaccatagtaacatactagttcgaaagcgtaaatagtcttttactcatttataaatagtaaaatagaacacataatgataagaggactaccatggttgacatcaaacgtaagttcagggccgaagatggtcttgacgcaggcggtgataagatagttaacgttgcgcttgctgaccgcacagttggcaccgatggcgtgaacgttgactttttggtgcaagaaaacaccgtacagaattatgacgagacgcgcgcgtatacaaaagattttattgttctttatgataatcgtttttatcaagctttaagcgatattccagctccggcaggccctttctctttggctaaatggaaggcaactcgtacagatgcagaatggattacagttcaaggcggagatttccaattatcagtaggtaactctattgcggttgatacttcagctggcattgatattaatttcactttgcctcaaaatcctttagatggcgatacagttattttgtctgatattggcggtagagtaggctatgtaaaagttcaaattactgcagaggctcaaagtattgtaaactttagaggacaacaggttcgttcagttttaatgacgcacccaaaatctaaaatagtattcatttttagcaaccgcctatggcaaatgtatgtttctgattatgaacgtaatgcagtcacagtaactcctgctaagccatatcaggcgcaacctaacgattttatcattcgacgttttacatcagccgctcctattaatattacattgcctcgcaatgctaataatggcgatattattaatttagttgatttagacaaattaaacccgttatatcacacaattgtcaaaacttacgatgatacaacttctatacgagaagccggtgttcatgtagcagaaggacgtaatactgcagaagcgttctttgtttatgattctgctaatagcttatggcgtgtttgggaaggtgaccagaaatctcgtttacgtatagttcgtaatgatactgatttacgccctaatgaagaagttcttgtttttggaactaataatgatacaatctcgacggtaaatcttactttgcctacagatattttgtctggtgatactgttaaaatatcgttgaattatatgcgtaaagggcaaactgtaaaaattaaagctgctgaaggcgatacaattgctagcagtatttctttattacagttcccaaaacgttcagagtatccacctgatgcacaatgggtttctgttagtgagctggaatttaatggcgatacttcgtatgtccctgtacttgagttggcttatatagaagattattcatctgaaacaaaatattgggtagttcaacaaaacactgtaaccgtcgaacgagtcgatgcatcgagcaatacaactcgagctcgtttaggtgttattgctcttgcttctcaagcacaagcaaatgttgatttagaaaatgctcctggtaaagaactggctattactccggaaacattagcaaatcgtacagcaactgaaactcgtcgcggtattgctcgtattgcaacaactgcacaagttaaccagaataccgattttgcattccaggacgatttgattatttctcctaagaaattgaacgaacgtacagcaactgaaacccgtagaggtgttgctgaagttgcaactcaggctgaaactaatgctggaacagatgataccactattattactcctaagaaattggatgcccgtcaaggttctgaagttttatctggtattgtaaaatacacatctacgactggtactacagctgctactgttcgtggtaatgctgggactaacgtttataacaaagccgtagataatttaactatttctccaaaggctcttgaccagtataaagctacccatactcaacagggcgcagtaattcttgctattgaaagtgaagttatcgctggcgaatcacaagccggttgggctaatgctgtagtgacccctgaaactctgcataagaaaacttctactgatggacgtattggtttaattgaaattgctacgcaagcagaaactaacactggaactgattatactagagcagtaacgcctaagacgttaaatgataggaaagctacggaaggattatccggcatagccgaaattgctacgcaagttgaatttgatactggaactgacgatactcgtatctcgtctccactgaaaattaaaactcattttgattcttctgaccgtaccagtgttaattctgattccggacttattgaagaaggaaccttgtggaaccattatactcttgatatttctaaagcaaatgaaacacaacgcggtacacttcgcgtagcgacccaggcagaatctaatgcaggaactttagatgatgttcttattactcctaaaaagcttttagggactaagtccactgaaacgtctgaaggcgtgattaaggttgctactcaggctgaaactgtaacaggaacttctgctaatactgctgtatcacctaagaatttaaaatggattgttcaatcagaaccatcatggactgctactacggcaattcgtggattcgttaaaacttcatctggttctattacatttgtcggtgacgatactcaaggtaatacccaggatttgaatctttatgagaaaaatagttatgctatttctccatatgaattaaaccgtgtacttgctaactacttaccgttgaaagctaaagcagctgatagtaatttgttagatggtctagattctcttcagttcatccgtagagacatcgaccagacggttaatggttctttaagtcttactaaacagaccaacctgagtgctcctttagtatctacaagcaccgcttcttttggttccgaagcatctgttactcgtagattaactcttaatgactctagcggttccgaaatagttttcactaaaggaacccaatctcttagtaataaagagaatttcgttgttagagcatggggtaatagcgctacagctggtgaccgtgatacagtatttgaagcgggtgacgaaaccggataccatttctattctcagcgcgctgctgataataaagtatcatttaatattaatggaacactttattcaacaggtattgtttctacaaatggattaaatgttacaggtgtttctacctttaccgggcctattagtgctacaggcgaaattgtttctagttctcctattgcattcagagctattaacggtaactatggtgttatgctttataacgctggtaacagttcttatattgcattaactaactcaggtgaccagaccgggacgtttaataacttacgcccgatcacgattaacaatgccacaggattagttcgtcttgacaacggtgttcaaatcacaagtggtgcaacaataactaccggtgggttaactgtaaataacaggattatttctaacggcgttaaaactgccacggtttataccgataaaccaacagcttctactgtaggtttttggtctattgacattaacgattctgctgtatatagccaattccctggatactggacgcgtgataacaaaggtaaccgtgaccaagaaattaaatatcctggtactttgactcaattcggcaatagcttagattcgctttatcaggattggatttgttatcctacaggtgcaaatggtggtagtattcgatatactcgtacctggcagaaaaataaagacgcttggacctcatttgcaatggtatttgatagtggcaacccaccttcacctagcgatgtcggtgctatcccatccgataatgctgtgattggaaaccttactgttcgagacttcttacaattaggaaatgtgagaattgttccagacccggttaacaaaaccgttaaatttatatgggttgaataagaggttatatggaaaaatttatggcaaggtttggacagggatacgtccaaacgccgtttttatcggaaagcaattcagttagatttaagctaagtatagcgggttcatgcccgctttcaacaactaatccgtatattttgttccaaaacgagcctttagggttgcagtcttttggtattggactaaatgttagggtgataaatccggaaaatggaactatagttgatagtaaattatacaattttgcgcctacaaataatgcaacttcagctgcatttatttcgtttgttaatacatacgcagataatttcattttcgcatttatttctaataacaaatttaatttgccgccagaaataattgaatggtttaaagctgctgggagttcagttataccgtcaattgaagttgctagtcttgttgatatttcatattcagcgttttatgtttcaggtaaaaatactattgcattagaacacataaaatacagtaataagaaaacaatttctgattacgcaactccattagatattgtatatgactctattgctgatataggtgctaccggctatcctagacgtacatatgaagctctagaaacgtttttatctcctgttggaggaactaacaatgaaataaaaagggtgcctacatcatcccttgttactcctatcgcaaactatggattaaagcctacagattttctttatttgaaatttcaattaatggctgatgaagaattattagaggaaggaaccacaagactttcaattcgtttctttaagtctccatctagctctcctatatcatctaaagatataaactttgatggaactgccggggagtggaagctatatgaagaatacgttgaaataccagctgaagctgatggctttacagtatattgttaccgtacggcctcagtcggtcaaggtggactaagaaatgttattttcactgaagtatcatgtaacggaagtatagcaaaacccgccgagtttggtataaacggtattcgtgttaattacattgatgaatcattaaccggtaatgatataatggacttgcctactcagttatctaacgacacaggtaaggtatttgggcaggaatttaaagagtacacagaataaaggagacttcggtctccttttcgcgtataaatactttaatattaataaggagacacgaaatggccgatttaaaagccggaagtacagttggtggttccgtcatatggcatcaaggcaattttcctttaatgccagctggcgacgacatcctatataaaacatttaaattatacactgaatataacaagccaaaagcggctgataacgatttcgtatctaaagcaaatggtgggacatatctcaaaaaggtaatctttaacgaaggtgttgcagtcaaaacagcagatgaccaaacgaatggtattttttctggtggtggtgacgccgcgacattcgaccaaacaaacatggatattgtttcgtggtatggtattgggtttaaatcatctcaaggtacaggtgaaagaactgttgtaattgatactcgcaccggtaatataagttctaaaggcgttattgaagcatctcaattcagagccacaacgttagcacctttaaataattacgaccttactcgcaaagattatgttgatagtcaaataaatacagttaatgctaatgcaaacagtcgtgtactccgttcaggagatacgatgaccggcgcgctaaccgccccaaactttttctcacagaatcctgcatctcaaccctcgcatgttccacgatttgatcaaattgttattaaggattctgttcaagatttcggctattattaagaggacttatggctactttaaaacaaatacaatttaaaagaagcaaaactgcaggagcacgtcctgccgcttcagtattagccgaaggtgaattggctataaacttaaaagaccgtgtactttttactaaagatgaccaaggaaatattattgatctgggttttgctaaaggtggtagtattgacgggaatgttattcatactggcaattataaccaaactggcgattatactttaaatggcaccttcactcagacaggtaattttaatttaaccggtattgctcgagtaactcgtgatattattgccgctgggcagattatgactgaaggcggtgaacttattacaaaaagttcaggtacagcacatgttcgttttcatgattcggctgatcgtgaacgtggcattatttatgcaccggctaatgatggattaactacgcaagtagttaatatccgcgttaaagactacgccgctggtgatgaaagcacctatgcattttcgggcagtggactatttacttcacctgaagtgtcagcatggaaatctatgtcaactcctcagattttgacaaatagagttattactaataataaatctacgagcgattatgacatttattctatggcagacaacgttccattgtctgaaagcactactgctattaatcatctccgtgttatgcgcaatgctgtaggcgctggtgtattccatgaagttaaagataatgatggaataacttggtatactggagatggcttagacacttatctttggtcgtttacctggtccggtggattgaaagcaggccattctatttctgttggtactcctggtggcaataaaggatactctgaattagggactgcttcaatttctcttggcgataatgatacaggcttaaaatggcatcaagatggatattatttcagcgttaataatggaataaaaacgtttttatttagtcccaacgaaacaactagcctaagaaaatttgtagctggatattctaccaccggaaccgatttaactactcctccaactgaaaactatgctttggccactgttgttacttaccatgataataacgcgtttggagacggtcagactcttttaggatattatcaaggcggtaactatcatcattattttcgcggtaagggtactacaaacattaatactcacggcggtttgttagttactccaggtaatattgatgttattggcggttctgttaatatcgatggtagaaataattcttctacactgatgtttagaggtaacacgaccggagctagttcagttgataatatgacaatttccgtttggggcaatacgtttactaatcctaatgtaggtaatcgtaaaaacgtcatggaaatttctgatgcaactagctggatgagctatattcaaagacttactactggtgaagtagaaatgaacgttaatggttcatttgaatcatctggtgttactgctggagataggggagttcacacaacaggcgaaatttcatctggggctgtgaatgcgcttcgtatttggaataatgattatggagccatttttagacgttcagaaggcagtcttcatattattccaactgcttatggtgaaggtaaacatggtgatatcggtccacttcgcccgtttagtatggctttagataccggtaaagttactattccagatttacaatcaagttacaatacgttcgctgcgaacggctatattaaatttgttggtcatggcgctggcgctggtggttatgatattcaatatgttcaagcggctcctattttccaggaaatcgatgatgatgctgtaagtaaatattatcctattgttaagcagaagtttttaaacggtaaagcagtttggtctttaggtactgaaattaattcgggtacatttgttttacaccatatcaaagaagatggatcacaaggccatacatctcgttttaatcaagacggcacagttaatttccctgataatgttcaggttggtggtggtgaagctactattgctcgcaacggtaacatctggtctgatatctggaaaacgtttacttctgccggtgatgtaactaatatccatgacgctattgctactcgtgttgccaaagaaggtgatacgatgacaggccgcttaactcttaatgcaaactcggatgttattgttattaacagtgctgcaaccgaatctggctatttgaaaggacaaaaagccggcgttgataactggtatgtaggtaatggtggggctgataatgccatatcgttttatagtttccgaaataattcaggcataaatgttaataatggtggcgatattgctttaaacccagaagggtccgccacttttaattttaataaggaccgactttatataaatggttcggtttggacctcacaccaggccggcgattggggaaatcaatggcgccaggaagctcctgtatttgtggattttggctacgtcggtaatgatagttattatccaattatcaaaggaaaatctggtattactaacgaaggatatttttcaggcgttgattttggtatgcgacgcattcctaataactgggcacaaggtattattcgtgttggtaaccaggaaaatgctagcgatccgcaagctatcttcgaattccaccataatggaaacatgtacgttcctgacatggttaaagctggagtaagattatcagctggtggaggtgaccctgcatggacaggcgcatgtgttgttattggtgataatgacactgggttagttcatggcggtgacggtcgtattaacatggttgcaaatggagtgcatattgcttcgtggtcagctgcttatcagatccatgaaggtctttgggattcaactggtgctttatggactgaaacaggaagagctattatttcttatgggcatttagtccaacaaagtgatgcctattccacatatgtccgcgatgtttatgtccgctctgatattcgtgttaaaaagaacctcgttaaatttgaaaatgcttctgagaagctttctaaaattaacggttacacttatatgcagaagcgaggcctagatgaagaaggcaatcagaaatgggaacctaacgccggtttaattgctcaagaagttcaagctattttaccagaattagttgaaggcgacccggatggtgaagctttacttcgtttgaactataacggtgtaattggtttaaatacagctgcaatcaatgagcatactgcagaaattgcagaacttaagtcagagattgaagagcttaaaaaattagttaaatcattgttaaaataataagaggggcttcggccccttggaggtgtatatggcagttgaaggaccgtgggtaggatggtctgcaagggtacagactggagatccttggatgggtggtgccgcacagagattgagaatgggaattccgttttggatgagtaatatgataggtcgatctgttgaagtaattcacacgcttggagcagaccataacttcaatggtcaatggttccgagatagatgttttgaggcaggtagtgcacctatagtgtttaatatcaccggaaatttggtatcatatagtaaagatgttccattattctttatgtatggcgatacaccaaatgaatatgttactttgaatattcatggtggagttcatatgtggggacgaggtggtaacggtactgtaaacggaaacccaggcacaaatggcggcgatgtaatccaaaatgatatcggcggaagacttcgtatttggaactatggcgttattgcatcaggcggcggtggtggtggtgcagtgtcattacagaatagctgggcgccaaatgctacagcaggcggcggtggtggtagaccatttggcatcggcggaggcggcgttaattggccgggtggtaatgctagttatgacgccccgggcggtgccggttacacttcccaattcggcggaggcaatggcggtgatgctggaggtcggggcggagatggatggggtaatcacttatctagatctggcggtggtgctcctggcagagcagtattcggaagttcaccgtcatggggtgctacaggcacaatctacggctcctggatttaaacgataatacctctcaattataaatattgataaatgggaggtaatatggcagcaccaaaagtatcattttcgcctagtgatattttatttgggttgctagaccgcattttcaaagataacgcctctggaaatattcttatttcaagagttgctgttgtagttcttttgttcctaatggcactaatatggtacaaagggaatatttttatggattattacgtgaggtcgaaatatgatacttacacagaagtaattcaaaaagaaagaaatacacgatttgaatctgcggctttagaacaactacaaatagtccacgtcacatcaagggcggattttagttcggtgtattctttcagacctaaaaatctaaattatttcgtcgaccttattgcgtatgaaggtaagttacctagcacagtaactgaaaaatctatgggaggatttcctgtcgataaaacgacagcagaatattcggtccatttaagtggacttcactttacttctaaaacagattttgctttcttacctaccaaatcaaaaactccggaactggcatatatgtatagttgtccttacttcaatttggataacatatatgcgggaactgtttctatgtattggtataaggggtcggatgtgttaaatgaagaacgcttggctgcaatatgcaaccaagcagcaaggatattagggcgggctaaataattagttgttagaatacatcgtcaaatggcgataaatattttcaaaaccttcattgaattcactaatcagtgttttcttttcttcggcagttaaatttgtaattagttttctgaacgaattctgatttagctgccgaccatcttttttaattccaatctcattcaagaatccgatgaaatttgctcggtcttcaacaatatcttccctagagaatttaatcaaaatagaagcaatagtaataatttcacgtacgatttcaatgtctttattcataacgttttattcattccatttggttcgatatgagtatagtaccattatcagtgttgattgtaaacagctttttctacacttttaacgtaatcagtgtagtcttcctgttcatacgagtgtaaggccaagaacgtggctaatagttcattatagactaaagcctcacgctcacgttcggcctctactacgttctgaagattatgactcatattgttccttataactatcaatgtagtcctgtatgtcgaagaatgacatttcatattctaggacattaagagcccgttcttcagtatagtcagaaccaaatacgatagtgatttcaccaggcttcatacgatcgaaatcaacactaaaatgaatacgagaacatacttcgtctgccatatctgcaacaacactacgatacacttctcggttaacctgataaagctctgcaagttcttcacatcgaataacaagttcagtggcaggattttcttttattttagtaagcatagtctttacccttatgtttttgtttgcgtttagattgaagttccgatttcttcttgtccttatggacggaagccttattgaaatcatgttttgctacaagattgttcataatgatttataacctcatttaaacatttatcggtaaaagaaaactttttagccacagaacattcgataatgtgttctttcaaatctttagagtcagtataacccatctcagtaataaagtggcgaattaaagctttattcttatcattaacagaattaaaataatctgctttagaatcaattattctcatcatctaatttccttaattgatattgcaacgagctaataatttcttcgttcattttaatatacatgtcacgcaagaaaggttttaacccttcacgaataattgctaatgtatcacctttacataaattaaccaaatacggatgatctaaagcgtcccaaccaggctgattagcatacatgccatagttttcttccatcatatgattaagacgtttgatatcttggatacgtgattcaatagcatctttctggagttgtttaatattcattaataaaggtcctctgaataaagttctttctcacttccaccacgttcaatacgtacctgtccagcatacgttgcaataatcattgcttcttcacgcgtccagtaattagagtattggtcaataaagccttggtcgtcaccacaaacttgttgcgagactaattgaggaccaactatatcaagtacttcagccatatctttagagtaatgacgaactccaggaataatcagagttccgccgctcttcaatttaaatctattagctgcacatactataacacgttgaactttttggtcattgttccaatagcacgtttgccaacagatttcaggaacttcattcattatatcatcagcagaataattataaccgtaggactggaatttttctgctagactttcaggagtctcacgagacaaggccaaatctaatagctctaaacgttctttaaatgatttcatttaagccattccttaatacgttgccaaatagatttttgtgattgtttatttacaccaatcgaacgaataaccggttgtgactgctgatattctttataatcttctttatagatttcgtaagctgcatcaacaaatgaactgatcgctgccatgtagtttttacgaaggccaaatggcgcgtcattattttcacgaataaccgtatattggcctgctttaatctttacaattgtccctaaataagccccgtggtaccaaatatcccatccttcctgagtaggttctgcacatttacgaagttcgttaataatattcagcttattcattatgtattcctcacagtacgttagttacaagggtaatgatttctttggacacattagggaagtcaatgtaagtatatttaccaccgatcttaatcttaacatcattttcaagagaagtaaacagctttgattcagtttctgacatgttgtatgcaaagattctaagagcgccatctcgtcgaatttcaatttggcgaatgcctagaactcgtttagcgaatcgaacttctaagttactacggttttcaccaatttctttaacttcaactttatctttaatattttcaaaaacaaagtttgctaattcatgcatttcaggagtaactccacgtgcttttctggtgttacgtttctgaagaagttctggagcattttcttgggcaaagaggtctgcagctttttggataatatccattgcttcgccggttgccacaagtccatcaccagatttttcgactaaacctttcttaatcaatacaccaatgttagagttaacaactgatgcattgtattctgcttccagagcttcacggacattggcagcagtggtgaagttgttcttaatgatataaaccattattgcagcagttttttcattcagagcgttttcagaagctttgatgatgtaagtaactttagacattttatttctccaaattagtatttgttttgataggtctataatatcatgtttgaagcatatgtaaactgttttgtgagaaaaaaatgcacaaaagggagcttcggctccctaatcatgtttgtccaaccaatacagccaaatcactaatgcagctattgcaccgagaaatcctaaggctagggcactcaaagtgcctccaagtctttagtgtactctgtcacaacatcagtagacttccaatactcattttcttctttcttagctttagcttcttctgccagtttacgtgattcatcggaagtgatatggaagatgttaagacctaccagtttatcgacatgttctttatacatttcgatttgtgctagctcttcagtcaaagctttacgagtcttgccctgaatcacaatttcgccactgataacttttttgatgaagtgggccttagcaaaagcaagtttaaatgctttttcagattcaaggattttgttgtcaatacgtttctgaacgtaagtcttacggacttcaacaaaatctttgattaagtccactacgttatcgtagacagctaatttacccttttcattaatcactgtgatgttttgtgaacgacgttcgatgagactaaaatctttcatgattttttcatgacgtagctcttcatcatcaggaagcgagtactctttacggaacttcaccttaaacccaaagccgtgttcaccgcaatcatcttcccatgagattagacctttgtcttccaacgggtcaagaaccttactcacatacgtttcacggtcgaatttatatgggatttcagttatctgcatttgagtgcgagatgtgaacttatatgttccgtgaatctcataacgcccatcaacttcatgtacttcaccacggaattccgggaattcaacttttggcttagtgacatttttaccttgaagagcttgtaatacggcctttttgaccgatttaaaactatgaggcagaatatttgttgcgtaaccggttgcaataccggagacaccattcaaaagaactgttggaataataggaagatagaattttggcggaatgtgttctttatcttcatgagctggagcatattcagtatctttatatacgttatagaaatttttacttacacgagcaaaaatataacgagatgctgcagccttttggactgttctagagccaaagttgccttggccatctaacagtggatagttgttattccatgtgttagccatcaatgcacctgcatcttgtgcagaagattcaccatggtgataacctaaatctgcaacaccgcctgcaattgacgcaagtttatgaaatttttctttattaccacgagccaaatctaacgcacgatgaaccacaaaacgttgaaccggcttaaatccatcaatcatgttcgggattgcacggttttcaacggtgtacatcgcatatgctaaggcttcgttatcaataatactttttagattacgagaattcaattgcatattttcaccatattaatgaatgaataaccattataacatctgaaatgaaaagcactacttggactagtccaaacatcacaccatagtacagaaccgtaagcaacaacaagagccctaaggctcctgctaagattttcttaatcattactcgccttttaatacgttaagaagagctaagactgctaaggtaccttgtgatactgcttgttgaaatactgttgtttcgcctgtaactaaagtgttaacgaataaaaacgaccaacacagcaatgcaataatccatgctaccattttaattacctcacaaataaattaaaggcctattaagctaggcctatataaattagtaactctgcagaatgaatctgaaattatctgccagaagacggttcatttcagtgagtgtttgatattctgatgaatgattgcgagtgaacgccagagccaattgacctttaccgtaaccagtagtcagaggtttcatgttcttagctgaaacaaagattacatcatattcaatattgttagtgcccatggtacgggctagttgcgaacggccttgacgaatgtgagaaagaattgcatccaacccttgtttagaacgttgacgtcctacaaagaatcgtgctgctacttgtcgccaatcagatgaacctttaacaaagaagtaaaaaccttcacgagaacgaaactctttagaaacttcagaaccgtattcgccattacgaactactgcaacaacttcaccgccaactgccagaaggtctttacgagttaaatatttggacatgctaatttcctcaattgattaatgtttttgtaatccatgagagcattatactctgctctcaagagtttgtacaattttattcggtcatatcagaacgttcaaaaagctcttcaacagttaaacattcggtgtcatcctcaataaagaatcgggtccaacacgttggggcgatgcagttatgagtttgtccggctatagaagctacacgaataagctgctgaccattattcaggacaaatttttcaccaatttcaacatctttaaaaagcttagccattttgtattcctcgtgttttgataggactactataccataatcctaccttgatgtaaacaattaaattacattaaaatatgttaaagccaaccatgttccggtgaacgaacatgcgatgtaaaaacctgtatcgcaaattgttcttagtacaataagaagtgcatttttcataagtacctcaatacaattgaaaatattatacaaatcatagggatactaagcaaccatattccgatccacattttagagctcatatctcaacttccgcgagttccatatatcctttgttgataacctctttaaggtctttagaaagaataacactaaaatggtcgttcatatgtccattaactaaacgagttatttcggcttcagatgacatataaggcacgtctgagtcccaatgagatagacctaaatgggtataaatcatcccttcgtcgtctgcagtgttgtacattgaaacaaattcgcctgttactttatgttttgcgtagaaaaatttaaatttcatgatgttatcctcttttagataggactactatatcatagtcctacttagttgtaaacacttttatgaaattaaagatgaagataccacccgttgtagttgctcttgcggacgattttctttaggtcttcatggtctcccacgaactttatagaataagagaagacgtcaggtgaggtttctttgacatctaatataataatgcaatctgcgactcgatggttcaagaagggccctatattgattccattaccaccaggataatcacccctgtatcctgtggtaaccgaaatccatttacaatctatctggtgcgttttgacttcgacacgcaacccgcagtatttaggatgagctaacacgtcccatgcatacgtgtacgggtcttctacgtcttcattacctttattaacatatccgtctagccaatttgctactacatactctgcaaagactgcaaccttacaacgtcgaacaacgtcttcttttatttgacctggatcttgtttcaacgagtaccgagcagtatcagcgatcttaaccttcatttcgctagtcaaaaactcattcgacaggataaatgtcggaagactcttcagcctcaacagtcccaagttcgtctttaccatagatacctctgatgtgtagttcaccaaaataaatgcggtcaccttcttcaagatattctgcatctacaggcggaatttcaataacaacttcgtcgcattctaaccagccgtagtgtgcatcgccaggatgttttaccaatttagcacaataaactgatttacacttatgatgaccacgaagattagcaattttggattctgatacgtcaaatggatgaatcataattacccctaaagaaaaaaggggaccgaagtccccaattattattctgcaaataattcagtaacgtctgaaattacttcataacgacaagtacgggtcgtagcatcgccatagtcaactgggatggatacaacatcacgtggatgaactttaaccttaacaactttatctgagctagaaccaaagtaacgaatatatgatttagcgcaaacatgtagaccacgggagcaggtttgtgtatcatcatcgttaacacgagtacgaggcattgaaacaactttaccaggcgagttatcaaatgtgccactatagcaatctaaatagtctttacgaactactttccacgcatagaaatgtccgtcttcagtgatttcaatatcgtttgcaaccaagaagtcgaataaacgttgtacagctttttcgcttgggttttctaacaggttttcaaggaacggcagatagaatttaaagtcttcgcctttttccatagaatcaataatacgattaaccagtcctgaacgaatttctataccttgataaaataaactaccaccttcaatagtaacattaccgtcaacaaacttagtaatagctttcttgatgttaataagttcgacagctttactaaggtttcctgcgaccaaattagctttaatttcttcaaaatttgcatgacttgatggggtcgcattgtatgctacgcgtccttcaatgattgaaataaatttagatgatgcgttccatacgatttctggacgatgacctgtaataataggttcattattttctgggacctgttcttcgtcttcaaattcagctgctttctcttcagctttaaaattcttaacaatcttacgaagagtatctgttgaaatgtcgaagtaatcggcaatttctttacgagtccatttgcctgattcaaccaggccgtaagcttctaactgttcttcttgggacaagcatttaatattgtacataatgtttcc

SEQ ID NO: 13 - DNA, 85 bp, Escherichia coli
  source 1..85: mol_type = genomic DNA
aacctaaatatttgttgttaagctgcaatggaaacggtaaaagcggctagtatttaaagggatggatgacatctcagcgttgtcg

SEQ ID NO: 14 - DNA, 35 bp, Escherichia coli
  source 1..35: mol_type = genomic DNA
ttgacggctagctcagtcctaggtacagtgctagc

SEQ ID NO: 15 - DNA, 29 bp, synthetic construct
  source 1..29: mol_type = other DNA
cggtttatccccgctggcgcggggaactc

SEQ ID NO: 16 - DNA, 37 bp, synthetic construct
  source 1..37: mol_type = other DNA
ttgacgcgtagctcagaggtaggtataatgctagaac

SEQ ID NO: 17 - DNA, 25 bp, synthetic construct
  source 1..25: mol_type = other DNA
cgctaacttcgacaaatatgctggc

SEQ ID NO: 18 - DNA, 23 bp, synthetic construct
  source 1..23: mol_type = other DNA
aggacgggatgatgttctgggaa

SEQ ID NO: 19 - DNA, 24 bp, synthetic construct
  source 1..24: mol_type = other DNA
caagtatgctaccaacggctaaag

SEQ ID NO: 20 - DNA, 24 bp, synthetic construct
  source 1..24: mol_type = other DNA
ccaatcaaaatcaacgtcgagtga
